(19) United States
(12) Patent Application Publication
(10) Pub. No.: US 2015/0038358 A1
(43) Pub. Date: Feb. 5, 2015

(54) METHODS FOR DETECTING TRISOMY 21

(71) Applicant: UNIVERSITY OF KANSAS, Lawrence, KS (US)

(72) Inventors: Carl Philip Weiner, Kansas City, KS (US); Yafeng Dong, Kansas City, KS (US)

(21) Appl. No.: 14/361,895

(22) PCT Filed: Nov. 30, 2012
(86) PCT No.: PCT/US2012/067328

§ 371 Date: May 30, 2014

Related U.S. Application Data
(60) Provisional application No. 61/565,761, filed on Dec. 1, 2011.

(51) Int. Cl. C12Q 1/68

(52) U.S. Cl. CPC C12Q 1/6883; C12Q 2600/16; C12Q 2600/158; C12Q 2600/156
USPC 506/9

(57) ABSTRACT

Methods for determining whether a subject, such as a fetus, has Down syndrome are described. In one embodiment, the methods include detecting one or more biomarkers in a biological sample, and determining whether the expression of the biomarkers is altered when compared to expression of the biomarkers in one or more subjects that do not have trisomy 21. In one embodiment, the biological sample is a blood sample, and the biomarkers are cell free plasma RNAs.

### CROSS-REFERENCE TO RELATED APPLICATIONS

[0001] This application claims the benefit of U.S. Provisional Application Ser. No. 61/565,761 filed Dec. 1, 2011, which is incorporated by reference herein.

### SEQUENCE LISTING

[0002] This application contains a Sequence Listing which has been submitted in ASCII format via EFS-Web and is hereby incorporated by reference in its entirety. The ASCII copy, created on Nov. 29, 2012, is named 42020201.txt and is 768,465 bytes in size.

### BACKGROUND

[0003] Trisomy 21, also referred to as Down Syndrome and mongolism, is the result of a chromosomal abnormality. A human cell has two types of chromosomes. One type is the autosomal chromosomes (chromosomes 1-22), and the other type is the sex chromosome (the X and Y chromosomes). In a normal human cell there are 46 chromosomes, and they are present in the cell as 23 pairs. Thus each normal human cell has two of each autosomal chromosome (two copies of chromosome 1, two copies of chromosome 2, etc.) and one pair of sex chromosomes (an X and a Y chromosome for a male, or two X chromosomes for a female). A karyotype of a normal male is referred to as 46XY, and that of a normal female is 46XX. The chromosomal abnormality in a person having trisomy 21 is an extra chromosome 21. The karyotype of a male having trisomy 21 is 47XY+21, and the karyotype of a female having trisomy 21 is 47XX+21.

[0004] Trisomy 21 is typically caused by a meiotic nondisjunction event. With nondisjunction, a gamete (either a sperm or egg cell) is produced with an extra copy of the chromosome 21; thus, the gamete has 24 and not the normal 23 chromosomes. When combined with a normal gamete from the other parent, the resulting embryo has 47 chromosomes, with three copies of chromosome 21. An analogous process accounts for most cases of trisomy 13 and 18. Trisomy 21 is the cause of approximately 95% of Down syndromes, with 88% resulting from nondisjunction in the maternal gamete and 8% from nondisjunction in the paternal gamete. The actual Down syndrome “critical region” encompasses chromosome bands 21q22.1-q22.3.

[0005] Since trisomy 21 is usually caused by nondisjunction in the gametes prior to conception, all cells in the resulting conceptus are affected. However, when some of the cells in the body are normal and other cells have trisomy 21, it is called mosaic Down syndrome (46,XX/47,XX,+21). This can occur in one of main two ways: in the first, a nondisjunctional event in a normal embryo during an early cell division results in a fraction of the cells having trisomy 21; in the second, a Down syndrome embryo secondary to nondisjunction loses the extra 21 chromosome with the result of a normal cell line. There is considerable variability in the fraction of trisomy 21 cells among mosaic trisomy 21, both as a whole and among tissues. Mosaicism causes 1-2% of Down syndrome.

[0006] Down syndrome is the result of a random event during the formation of sex cells or pregnancy. There is no evidence that it is due to parental behavior (other than age) or environmental factors. In 2006, the Centers for Disease Control and Prevention estimated the overall rate for Down syndrome in the United States was one per 733 live births (5429 new cases per year). Approximately 95% of these are trisomy 21. Down syndrome occurs in all ethnic groups and among all economic classes.

[0007] Maternal age affects the probability of conceiving a fetus with Down syndrome. At maternal age 20 to 24, the probability is one in 1562; at age 35 to 39 the probability is one in 214, and above age 45 the probability is one in 19 (Huether et al., 1998, J Med Genet 35 (6): 482-90. doi:10.1136/jmg.35.6.482. PMID 9643290). Although the probability increases with advancing maternal age, 80% of children with Down syndrome are born to women under the age of 35, reflecting the overall fecundity of that age group. Recent information suggests paternal age, especially beyond 42 years increases the risk of Down syndrome too.

[0008] A diagnostic test for Down syndrome is typically preceded by some form of screening test (history, ultrasound or blood protein measurement) as the current methods for diagnosis involves an invasive test-amniocentesis, chorionic villus sampling or percutaneous umbilical cord blood sampling (PUBS)—that is then offered to families who are screen positive, i.e.

[0009] have an increased likelihood of having a fetus with Down syndrome. In the United States, the American College of Obstetrics and Gynecology guidelines recommend non-invasive screening and invasive testing be offered to all women, regardless of their age, and most likely all physicians follow these guidelines. This recommendation is supported by some insurance plans that only reimburse invasive testing if the woman is >34 years old or if she has received a high-risk score from a non-invasive screening test Amniocentesis, CVS and PUBS are invasive procedures that involve inserting instruments into the uterus, and therefore carry a risk of causing fetal injury or pregnancy loss. The risks of a loss from CVS and amniocentesis are often quoted as 1% and 0.5% respectively. In all likelihood, the fetuses lost as a result are otherwise normal.

[0010] There are several common non-invasive screening tests that can identify a fetus at high risk for Down syndrome. These tests are typically performed in the late 1^{st} or early 2^{nd} trimester. Due to the nature of screening, each test has a significant chance of a false positive that is suggesting the fetus has Down syndrome when in fact, the fetus does not. Screen positive tests must be verified by an invasive procedure before a diagnosis of Down syndrome is made. Common screening procedures for Down syndrome are given in Table 1.

TABLE 1
First and Second trimester Down syndrome screens

| | Weeks | | False | |
|---|---|---|---|---|
| | gestation | Detection | positive | |
| Screen | performed | rate | rate | Description |
| Quad screen | 15-20 | 81% | 5% | Measures the maternal |
| | | | | serum α feto protein, |
| | | | | estriol, human chorionic |
| | | | | gonadotropin (hCG) |
| | | | | and inhibin-α. |
| Nuchal | 10-13.5 | 85% | 5% | Uses ultrasound to |
| translucency/ | | | | measure Nuchal |
| free β/ | | | | Translucency (NT) plus |
| PAPP-A | | | | free β hCG and PAPP-A. |
| (1^{st} Trimester | | | | |
| Combined | | | | |
| Test) | | | | |
| Integrated | 10-13.5 | 95% | 5% | The Integrated test uses |
| Test | and 15-20 | | | both the 1^{st} Trimester |
| | | | | Combined test and the |
| | | | | 2^{nd} Trimester Quad test |
| | | | | to yield a more accurate |
| | | | | screening result. |

Even with the best available non-invasive screening tests, the detection rate is 90-95% with a screen positive rate set at 2.5%. Screening tests more commonly used have screen positive rates of 5-7.5%. Inaccuracies may result from undetected multiple fetuses (rare with adequate ultrasound testing), incorrect dating of the pregnancy, normal variation in the ultrasound measurements or maternal protein levels that constitute the screen, or operator error. These ultrasound measurements and protein levels overlap in the healthy and disease groups broadly in all instances.

[0011] Confirmation of screen positive status requires a fetal karyotype that is normally accomplished by amniocentesis or chorionic villus sampling (CVS). Amniocentesis involves taking amniotic fluid from the amniotic sac, and CVS a placental biopsy, each to obtain fetal cells. The laboratory work can take several weeks but will detect over 99.8% of all numerical chromosomal problems with a very low false positive rate; however, these methods of confirmation have the risk of miscarriage of a healthy fetus.

[0012] The focus of noninvasive diagnosis of Down syndrome has been on the detection and separation of fetal DNA found in the mother's peripheral blood derived from chromosome 21. A few investigators have tried to use RNA based technologies with mixed success.

### SUMMARY OF THE INVENTION

[0013] Provided herein are methods for determining whether a subject has trisomy 21. In one embodiment, a method may include screening a fetus for trisomy 21. The method may include measuring a plurality of trisomy 21 biomarkers in a biological sample obtained from a first pregnant female, wherein the plurality of trisomy 21 biomarkers is chosen from any combination of SEQ ID NO:8-3,248, or a complement thereof. In one embodiment, the T21 biomarkers may be chosen from a sequence of at least 15 consecutive nucleotides selected from any combination of SEQ ID NO:8-3,248, or a complement thereof. In one embodiment, the fetus of the first pregnant female is between 8 weeks and 16 weeks post-implantation.

[0014] The method may also include identifying the fetus as having trisomy 21 if expression of the plurality of biomarkers is altered to a statistically significant degree in the biological sample compared to a biological sample from a second pregnant female carrying a fetus not having trisomy 21. The method may also include identifying the fetus as not having trisomy 21 if expression of the plurality of biomarkers is not altered to a statistically significant degree in the biological sample compared to a biological sample from a second pregnant female carrying a fetus not having trisomy 21. In one embodiment, expression of a trisomy 21 biomarker is altered to a statistically significant degree if it is outside the 95% confidence interval for that trisomy 21 biomarker. In one embodiment, the method may further include recommending a genetic test chosen from amniocentesis, cordocentesis, and chorionic villus sampling, ultrasound, or a combination thereof.

[0015] In one embodiment, the plurality of trisomy 21 biomarkers may include at least 10 trisomy 21 biomarkers, wherein the pregnant mother having at least 6 biomarkers altered to a statistically significant degree is identified as carrying a fetus having trisomy 21. In one embodiment, the plurality of trisomy 21 biomarkers includes at least 10 trisomy 21 biomarkers, and wherein the pregnant mother having no greater than 4 biomarkers altered to a statistically significant degree is identified as carrying a fetus not having trisomy 21. In one embodiment, the first pregnant female and the second pregnant female may be matched with respect to a co-variable selected from, for instance, maternal age, gestational stage, maternal weight, diet, smoking, prior preterm birth, diabetes, use of prophylactic progesterone, ethnicity, or a combination thereof.

[0016] In one embodiment, the trisomy 21 biomarkers may be selected from polynucleotides encoded by chromosome 21, or from polynucleotides encoded by any of chromosomes 1-20, 22 or X. In one embodiment, the trisomy 21 biomarkers may be selected from polynucleotides that are up-regulated in the first pregnant female carrying a fetus with trisomy 21 compared to the second pregnant female carrying a fetus not having trisomy 21. In one embodiment, the trisomy 21 biomarkers may be selected from polynucleotides that are down-regulated in the first pregnant female carrying a fetus with trisomy 21 compared to the second pregnant female carrying a fetus not having trisomy 21.

[0017] In one embodiment, the method may further include obtaining the biological sample from the first pregnant female. The obtaining may include obtaining a blood sample. The blood sample may be processed to remove cells from the blood sample. The blood sample may be processed to obtain, and optionally isolate, cell-free plasma RNA. In one embodiment, the method may further include converting RNA polynucleotides present in the biological sample into cDNA molecules, and the measuring includes hybridization between a cDNA molecule and a complementary trisomy 21 biomarker. In one embodiment, the complementary trisomy 21 biomarker is in solution during the hybridization, and in one embodiment, the complementary trisomy 21 biomarker is immobilized on a solid support.

[0018] In one embodiment, a method may include detecting trisomy 21 in a fetus. The method may include detecting trisomy 21 biomarkers in a biological sample to yield an expression level of each detected trisomy 21 biomarker. In one embodiment, the biological sample includes plasma from a pregnant female. In one embodiment, the T21 biomarkers may be chosen from a sequence of at least 15 consecutive nucleotides selected from any combination of SEQ ID NO:8-3,248, or a complement thereof. In one embodiment, the fetus of the first pregnant female is between 8 weeks and 16 weeks post-implantation. The method may also include comparing the expression level of each detected trisomy 21 biomarker to the expression level of the trisomy 21 biomarker in pregnant females carrying a fetus without trisomy 21. In one embodiment, an expression level of a detected trisomy 21 biomarker that is outside the 95% confidence interval for that trisomy 21 biomarker indicates the expression level of the trisomy 21 biomarker is altered. In one embodiment, at least 10 trisomy 21 biomarkers are detected. In one embodiment, a fetus carried by the pregnant female is identified as carrying a fetus having trisomy 21 when at least 6 biomarkers are outside the 95% confidence interval. In one embodiment, the method may further include recommending a genetic test chosen from amniocentesis, cordocentesis, and chorionic villus sampling, ultrasound, or a combination thereof. In one embodiment, the pregnant female and the pregnant females used to establish the 95% confidence interval for each trisomy 21 biomarker may be matched with respect to a co-variable selected from, for instance, maternal age, gestational stage, maternal weight, diet, smoking, prior preterm birth, diabetes, use of prophylactic progesterone, ethnicity, or a combination thereof.

[0019] In one embodiment, the trisomy 21 biomarkers may be selected from polynucleotides encoded by chromosome 21, or from polynucleotides encoded by any of chromosomes 1-20, 22 or X. In one embodiment, the trisomy 21 biomarkers may be selected from polynucleotides that are up-regulated in the pregnant female carrying a fetus with trisomy 21 compared to the pregnant females carrying a fetus not having trisomy 21. In one embodiment, the trisomy 21 biomarkers may be selected from polynucleotides that are down-regulated in the pregnant female carrying a fetus with trisomy 21 compared to the pregnant females carrying a fetus not having trisomy 21.

[0020] In one embodiment, the method may further include obtaining the biological sample from the first pregnant female. The obtaining may include obtaining a blood sample. The blood sample may be processed to remove cells from the blood sample. The blood sample may be processed to obtain, and optionally isolate, cell-free plasma RNA. In one embodiment, the method may further include converting RNA polynucleotides present in the biological sample into cDNA molecules, and the measuring includes hybridization between a cDNA molecule and a complementary trisomy 21 biomarker. In one embodiment, the complementary trisomy 21 biomarker is in solution during the hybridization, and in one embodiment, the complementary trisomy 21 biomarker is immobilized on a solid support.

[0021] In one embodiment, a method may include detecting trisomy 21 in a fetus. The method may include detecting trisomy 21 biomarkers in a biological sample from a pregnant female to yield a sample expression profile. In one embodiment, the biological sample includes plasma from a pregnant female. In one embodiment, the T21 biomarkers may be chosen from a sequence of at least 15 consecutive nucleotides selected from any combination of SEQ ID NO:8-3,248, or a complement thereof. In one embodiment, the fetus of the first pregnant female is between 8 weeks and 16 weeks post-implantation. The method may also include comparing the sample expression profile with a reference expression profile, wherein a difference between the sample expression profile and the reference expression profile is indicative of the presence or absence of trisomy 21 in the fetus. In one embodiment, the reference expression profile is from at least one second pregnant female carrying a fetus without trisomy 21, and a difference between the sample expression profile and the reference expression profile is indicative of the presence of trisomy 21. In one embodiment, the reference expression profile is from at least one second pregnant female carrying a fetus with trisomy 21, and a difference between the sample expression profile and the reference expression profile is indicative of the absence of trisomy 21. In one embodiment, the method may further include recommending a genetic test chosen from amniocentesis, cordocentesis, and chorionic villus sampling, ultrasound, or a combination thereof.

[0022] In one embodiment, the difference between the sample expression profile and the reference expression profile is statistically significant. In one embodiment, the sample expression profile includes at least 10 trisomy 21 biomarkers. In one embodiment, the trisomy 21 biomarkers may be selected from polynucleotides encoded by chromosome 21, or from polynucleotides encoded by any of chromosomes 1-20, 22 or X. In one embodiment, the trisomy 21 biomarkers may be selected from polynucleotides that are up-regulated in the first pregnant female carrying a fetus with trisomy 21 compared to the second pregnant female carrying a fetus not having trisomy 21. In one embodiment, the trisomy 21 biomarkers may be selected from polynucleotides that are down-regulated in the first pregnant female carrying a fetus with trisomy 21 compared to the second pregnant female carrying a fetus not having trisomy 21. In one embodiment, the first pregnant female and the second pregnant female may be matched with respect to a co-variable selected from, for instance, maternal age, gestational stage, maternal weight, diet, smoking, prior preterm birth, diabetes, use of prophylactic progesterone, ethnicity, or a combination thereof.

[0023] In one embodiment, the method may further include obtaining the biological sample from the first pregnant female. The obtaining may include obtaining a blood sample. The blood sample may be processed to remove cells from the blood sample. The blood sample may be processed to obtain, and optionally isolate, cell-free plasma RNA. In one embodiment, the method may further include converting RNA polynucleotides present in the biological sample into cDNA molecules, and the measuring includes hybridization between a cDNA molecule and a complementary trisomy 21 biomarker. In one embodiment, the complementary trisomy 21 biomarker is in solution during the hybridization, and in one embodiment, the complementary trisomy 21 biomarker is immobilized on a solid support.

[0024] Also provided herein are articles. In one embodiment, an article includes a substrate and a plurality of different polynucleotides. In one embodiment, the polynucleotides are selected from any combination of SEQ ID NO:8-3,248, or a complement thereof. In one embodiment, the T21 biomarkers are selected from a sequence of at least 15 consecutive nucleotides selected from any combination of SEQ ID NO:8-3,248, or a complement thereof The polynucleotides are immobilized onto a surface of the substrate. In one embodiment, the polynucleotides are immobilized on the substrate surface to form a microarray. In one embodiment, at least 10 polynucleotides are immobilized on the substrate surface.

[0025] Also provided herein are kits. In one embodiment, a kit includes an article having a substrate, a plurality of different polynucleotides immobilized onto a surface of the substrate, and packaging materials and instructions for use. In one embodiment, the polynucleotides are selected from any combination of SEQ ID NO:8-3,248, or a complement thereof In one embodiment, the T21 biomarkers are selected from a sequence of at least 15 consecutive nucleotides selected from any combination of SEQ ID NO:8-3,248, or a complement thereof In one embodiment, the polynucleotides are immobilized on the substrate surface to form a microarray.

[0026] The term “and/or” means one or all of the listed elements or a combination of any two or more of the listed elements.

[0027] The words “preferred” and “preferably” refer to embodiments of the invention that may afford certain benefits, under certain circumstances. However, other embodiments may also be preferred, under the same or other circumstances. Furthermore, the recitation of one or more preferred embodiments does not imply that other embodiments are not useful, and is not intended to exclude other embodiments from the scope of the invention.

[0028] The terms “comprises” and variations thereof do not have a limiting meaning where these terms appear in the description and claims.

[0029] Unless otherwise specified, “a,” “an,” “the,” and “at least one” are used interchangeably and mean one or more than one.

[0030] Also herein, the recitations of numerical ranges by endpoints include all numbers subsumed within that range (e.g., 1 to 5 includes 1, 1.5, 2, 2.75, 3, 3.80, 4, 5, etc.).

[0031] For any method disclosed herein that includes discrete steps, the steps may be conducted in any feasible order. And, as appropriate, any combination of two or more steps may be conducted simultaneously.

[0032] The above summary of the present invention is not intended to describe each disclosed embodiment or every implementation of the present invention. The description that follows more particularly exemplifies illustrative embodiments. In several places throughout the application, guidance is provided through lists of examples, which examples can be used in various combinations. In each instance, the recited list serves only as a representative group and should not be interpreted as an exclusive list.

### BRIEF DESCRIPTION OF THE FIGURES

[0033] FIG. 1. Examples of normalization sequences. Peptidylprolyl isomerase A (SEQ ID NO:1); snRNA:U6:96Aa (SEQ ID NO: 2); snRNA:U6:96Ab (SEQ ID NO: 3); and snRNA:U6:96Ac (SEQ ID NO: 4).

[0034] FIG. 2. Examples of T21 Biomarkers Selection: There are 3,143 mRNA biomarkers (FIGS. 2a) and 98 noncoding small RNA sequences (miRNA plus snoRNA) biomarkers (FIG. 2b) selected from around 25,000 genes using Affymetrix microarray technique.

[0035] FIG. 3. Examples of 3,143 T21 mRNA biomarker sequences. Each biomarker includes the following: SEQ ID NO, Chromosome location, Gene Symbol, Gene Accession Number, fold-change, and sequence.

[0036] FIG. 4. Examples of 98 T21 noncoding small RNA biomarker sequences (miRNA plus snoRNA). Each biomarker includes the following: SEQ ID NO, Chromosome location, Gene Symbol, Gene Accession Number, fold-change, and sequence.

[0037] FIG. 5. Examples of 15 T21 mRNA biomarkers confirmed by Real-time PCR in 10 affected pregnancies. The X-axis is the subject number. The figures represent a graphic illustration of marker expression in trisomy 21 (the squares) compared to the normal range for chromosomally normal fetuses. The dotted lines demarcate the 95% confidence interval for normal.

### DETAILED DESCRIPTION OF ILLUSTRATIVE EMBODIMENTS

[0038] Provided herein are polynucleotides useful for determining whether a subject, or a subject's fetus, has trisomy 21 (T21), and methods for using the polynucleotides. The methods described herein, and other embodiments disclosed herein such as reagents and kits, are based in part on the surprising discovery of a plurality of molecular markers, the expression levels of which consistently differentiate between healthy subjects and subjects with T21. The molecular markers are derived from coding regions whose altered expression in an affected subject, as measured from an easily obtained biological sample, is indicative of the subject, or the subject's fetus, having T21. As used herein, the term “polynucleotide” refers to a polymeric form of nucleotides of any length, either ribonucleotides or deoxynucleotides, and includes both double- and single-stranded DNA and RNA. A polynucleotide can be obtained directly from a natural source, or can be prepared with the aid of recombinant, enzymatic, or chemical techniques. A polynucleotide can be linear or circular in topology. The terms cDNA, oligonucleotide, probe, and nucleic acid are included within the definition of polynucleotide and these terms are used interchangeably. The term polynucleotide also includes peptide nucleic acids (Nielsen et al., 1991, Science. 254:1497-500), and other nucleic acid analogs and nucleic acid mimetics (see, e.g., McGall et al., U.S. Pat. No. 6,156,501).

[0039] In one embodiment, a method provided herein includes detecting one or more T21 biomarkers in a biological sample. As used herein, a “biological sample” refers to a sample of tissue or fluid obtained from a subject, including but not limited to, for example, whole blood, blood plasma, serum, lymph fluid, synovial fluid, cerebrospinal fluid, urine, and saliva. In one embodiment, a biological sample includes serum. In one embodiment the methods provided herein are directed to non-invasive methods of detecting T21, and in such an embodiment a biological sample may be a fluid. In one embodiment, a biological sample includes blood plasma. In one embodiment, a biological sample includes whole blood. As used herein, “subject” refers to a prenatal or postnatal human. A prenatal human includes a fetus. Unless indicated otherwise, as used herein the term “fetus” refers to a human during prenatal development from the time of first cell division until birth. The fetus may be at any age after implantation. For instance, the fetus may be at 2 weeks post-implantation (PI), 4 weeks PI, 6 weeks PI, 8 weeks PI, 10 weeks PI, 12 weeks PI, 14 weeks PI, 16 weeks PI, 18 weeks PI, 20 weeks PI, etc. In one embodiment, the fetus is between 8 weeks and 16 weeks PI, or between 10 weeks and 14 weeks PI. A postnatal human refers to an individual at any stage of development after birth, including a newborn, a child, an adolescent, or an adult, and includes a pregnant human mother. In one embodiment where the subject is a pregnant human mother, the mother does not have T21. In the embodiment where the subject is a pregnant human mother, a method provided herein allows one to determine if the fetus carried by the pregnant mother has T21.

[0040] As used herein, a “T21 biomarker” is a polynucleotide that is indicative of T21 in a subject. A T21 biomarker is indicative of T21 when the expression level or quantity of the biomarker is altered more often in a subject having T21 compared to a healthy subject. A T21 biomarker having an altered expression level or quantity is one that is expressed at a greater level (e.g., over-expressed) or expressed at a lower level (e.g., under-expressed) when compared to a healthy subject. Whether the expression level or quantity of a biomarker in a subject having T21 is altered, e.g., greater than or less than the expression level or quantity of the biomarker in a healthy subject, is determined using routine statistical methods by applying accepted confidence levels, and is described in greater detail herein.

[0041] It should be understood that the term “biomarker,” can, depending on the context, refer to the physical polynucleotide itself or to a graphical or numerical representation of the polynucleotide such as an amount of fluorescence present at a spot on a microarray, a band on a gel image, a numerical value, and the like. For example, the amount of fluorescence at a particular spot on a microarray may be referred to as a T21 biomarker. This graphical or numerical biomarker reflects the existence of the underlying expressed polynucleotide in the test sample, which gave rise to an expression level.

[0042] In one embodiment, the detecting of one or more T21 biomarkers in a biological sample yields an expression level of each detected biomarker. In one embodiment, the detecting of two or more T21 biomarkers in a biological sample yields a sample expression profile. An “expression level” is any physical representation of the amount of a selected T21 biomarker, as determined from one or more biological samples from a subject. A “sample expression profile” is any physical representation of the amounts of a set of two or more selected T21 biomarkers, as determined from one or more biological samples from a subject. The subject may be one known to have T21, known to have T21 of a particular type (for instance, 47XX+21, 47XY+21, or mosiac), known to be free of T21, or the status of T21 in the subject may be unknown. In one embodiment, a sample expression profile for a subject may include information from a single biological sample that has been analyzed for T21 biomarker expression levels. In one embodiment, a sample expression profile for a subject may include information from multiple types of biological samples that have been analyzed separately for T21 biomarker expression levels.

[0043] The terms “normal” and “healthy” are used herein interchangeably to refer to a subject or subjects who do not have a chromosomal abnormality associated with T21. A normal or healthy sample refers to a sample or samples obtained from a normal/healthy subject.

[0044] One skilled in the art will appreciate that more than one sample from a subject may be examined. The expression level and/or sample expression profile may be represented in visual graphical form, for example on paper or on a computer display, in a three dimensional form such as an array, and/or stored in a computer-readable medium. An expression level and/or sample expression profile may correspond to a particular status of T21 (e.g., presence or absence of T21) or type (e.g., 47XX+21, 47XY+21, or mosiac), and thus provide a template for comparison to a patient sample. A control expression level and/or a control expression profile, also referred to herein as a reference expression level and a reference expression profile, can be obtained by analyzing a biological sample from at least one healthy subject, or multiple samples obtained from a group of healthy subjects, or from one or more subjects identified as having comparable T21 in terms of type. When multiple samples from a group are used, the levels of expression of each detected T21 biomarker may be an average, consensus, or composite derived from the multiple samples. Similarly, comparable profiles can be obtained for age-matched and/or sex-matched subjects, and comparable profiles can be obtained for pregnant mothers at the same or similar stage of pregnancy. In one embodiment, expression levels and/or expression profiles can be obtained from a pregnant mother, and if the fetus is later determined to be healthy, such expression levels and/or expression profiles can be used as control expression levels and/or control expression profiles.

[0045] One skilled in the art will appreciate that multiple nontest factors may alter the marker level measured and may be mathematically adjusted by one of several well known and routine approaches. For example, the median level of each T21 biomarker may be determined at each gestational epoch in control women. If there is a statistically significant change with gestation, regression analysis of median on gestation weighted for the number of samples per epoch may be performed to determine the normal median curve that best fits the data. All results, both affected and unaffected pregnancies, may be expressed as multiples of the gestation-specific median (MoM) based on the fitted curve. In controls, potential co-variables may be examined, including maternal weight, smoking, prior preteen birth, diabetes or use of prophylactic progesterone and ethnicity, to see if they are significantly associated with the MoM. As the sample pool grows, it is likely other variables (such maternal medical diseases) may need to be considered. Plasma levels of fetal-placental derived sequences are specifically likely to decline on average with increased adiposity due to a fixed output being diluted into a greater volume of blood. If any co-variables are confirmed, the levels can be adjusted by, for instance, dividing the observed MoM by the expected median according to the co variable level found in unaffected pregnancies. Typically, the non-parametric Wilcoxon Rank Sum Test is used to select the subset of markers where there is a significant difference in the MoM distribution between affected and control pregnancies. As a large number of potential markers are to be tested, an extreme P-value of 0.005 may be used for an initial selection.

[0046] The risk of T21 may be modeled by the a priori risk of the disorder expressed as odds (a:b) multiplied by the likelihood ratio (LR) for the marker profile derived from multivariate Gaussian frequency distributions. All current aneuploidy and pre-eclampsia markers follow an approximately log Gaussian distribution over most of their range for both affected and unaffected pregnancies, and it is expected to be true for the T21 biomarkers disclosed herein. These Gaussian distributions are defined by the marker sequence means and standard deviations after log transformation. For a single marker, the LR is calculated by the ratio of the heights of the two overlapping distributions at the specific level. For extreme results that fall beyond the point where the data fits a Gaussian distribution, it is standard practice to use the LR at the end of the acceptable range. The method is the same for more than one marker except that the heights of multivariate log Gaussian distributions are used. These are defined, in addition to means and standard deviations, by the correlation coefficients between markers within affected and unaffected pregnancies.

[0047] The method of numerical integration may be used to model the best combination of markers from the initial subset. This involves division of each marker operating range into up to 100 equal units, calculation of the volumes under the affected and unaffected multivariate Gaussian curves risk as well as the risk in the mid-point of the volume. This determines the distribution of risks in affected and unaffected pregnancies. These distributions will be calculated for all marker combinations and the sensitivity compared for a fixed specificity.

[0048] A second approach may be considered based on the well-known fact that a strong association does not guarantee effective discrimination between affected and unaffected. Nor does a high AUC guarantee good prediction of actual risk. Hence, model calibration via reclassification can be useful in order to accept only those markers least likely to have been identified at random. Prognostic models may be built for predictive accuracy after confirmed T21 with only non-T21 biomarker variables (age, race, maternal weight, gestation age, maternal comorbidities, etc) and then build prognostic models to include T21 biomarkers. Dimensionality of the models may be reduced by translating the RNA marker contributions into a few components or composite scores. Principal components analysis may be used to derive the principal components of the T21 biomarkers factors. For instance, leading components that explain more than 85 percent of the total variation in genetic predictors may be retained and included in a prognostic model. Models that are more complicated (more predictors) may appear to have better predictive performance even if that is not the case. Therefore, the model performance may be quantified with respect to calibration and discrimination. Calibration may be examined by comparing the observed with the expected frequencies while the discriminatory accuracy may be assessed using the receiver operating characteristic (ROC) curve estimation for survival data. The true positive fraction or sensitivity and the false positive fraction (1-specificity) may be discussed using the derived prognostic models. For instance, the discriminatory accuracy may be compared between the models with and without validated genetic markers using the area under a ROC curve (AUC). Other validation techniques including cross-validation and bootstrap methods can also be carried to shed some insights about a model's adequacy. Alternatively, prognostic models can be constructed for T21 status (affected or unaffected) using logistic regression models. Modeling procedures may be similar to those previously described for routinely used Cox models.

[0049] In one embodiment, a T21 biomarker is RNA. In one embodiment, the RNA that is detected is cell-free, and is referred to herein as cell-free RNA. Cell-free RNA includes coding RNA (mRNA) and non-coding RNAs such as siRNA, miRNA, snoRNA, and snRNA. In one embodiment, cell-free RNA is from whole blood, blood plasma, or serum, and is referred to herein as cell-free plasma (CFP) RNA. CFP RNA includes coding RNA (mRNA) and non-coding RNAs such as, but not limited to, siRNA, miRNA, snoRNA, and snRNA. For instance, when the sample is blood, the CFP RNA to be detected is present in the plasma portion of the blood. Thus, in one embodiment, a biological sample is processed to remove cells prior to the detecting. In one embodiment, a biological sample is processed to minimize cell lysis. In one embodiment, the CFP RNA that is detected may be mRNA, non-coding RNA, or the combination thereof. Optionally, the CFP RNA may be isolated.

[0050] RNA may be obtained from a biological sample using routine methods. In one embodiment, RNA is obtained using a process based on a phenol/guanidium isothiocyanate/glycerol phase separation. Such a process may result in large quantities of CFP nucleic acid with total RNA yields of 1.5-30 ug or more from only 2 mL of plasma and full range of RNAs including not only mRNA but also small noncoding RNAs such as miRNA and snoRNA. This amount is more than enough for array technology and the performance of numerous PCR reactions using a clinically practical, single patient sample.

[0051] The RNA isolation method described herein allows for the isolation of 1.5 micrograms to 7 micrograms of CFP RNA from a 2 mL sample, which is more than enough for both microaarray gene screening and PCR validation. The method may include obtaining 2 mL or more of sample from a subject, such as plasma, and following the steps as described in Example 1.

[0052] The analysis of samples of blood obtained from pregnant mothers who later gave birth to healthy infants or gave birth to infants with T21 has led to the discovery of T21 biomarkers. Examples of T21 biomarkers are described at SEQ ID NO:8-3,248. Different combinations of the T21 biomarkers listed at SEQ ID NO:8-3,248, or the complement thereof, allow the skilled person to predict whether the fetus carried by a pregnant mother has T21. Changes in the expression levels of these biomarker polynucleotides in a subject, as measured in a biological sample from the subject, thus may be used to indicate the presence, absence, or type or T21 in a subject, such as a fetus carried by a mother, or an infant, child, adolescent, or adult.

[0053] The panel of T21 biomarkers includes a subset encoded by chromosome 21 (SEQ ID NOs:3,028-3,065 and 3,238, see FIG. 2A and 2B). That subset includes polynucleotides found to be up-regulated in a pregnant mother carrying a fetus that is T21 when compared to a pregnant mother carrying a normal fetus. That subset also includes polynucleotides found to be down-regulated in a pregnant mother carrying a fetus that is T21 when compared to a pregnant mother carrying a normal fetus. The panel of biomarkers includes a subset encoded by chromosomes other than chromosome 21, e.g., chromosomes 1-20, 22, and/or x (SEQ ID NOs:8-3,027, 3,066-3,227 and 3,239-3,248, see FIG. 2A and 2B). That subset includes polynucleotides found to be up-regulated in a pregnant mother carrying a fetus that is T21 when compared to a pregnant mother carrying a normal fetus. That subset also includes polynucleotides found to be down-regulated in a pregnant mother carrying a fetus that is T21 when compared to a pregnant mother carrying a normal fetus. The panel of T21 biomarkers includes a subset that are mRNAs (SEQ ID NO:8-3,250) and a subset that are small non-coding RNAs (SEQ ID NO:3,251-3,248). An expression level of a T21 biomarker may include polynucleotide expression level information for one polynucleotide chosen from SEQ ID NO:8-3,248, obtained from a biological sample from a subject. A sample expression profile may include polynucleotide expression level information for two or more polynucleotides chosen from SEQ ID NO:8-3,248, obtained from a biological sample from a subject, for instance, at least 2, at least 3, at least 4, at least 5, at least 6, at least 7, at least 8, at least 9, at least 10, at least 11, at least 12, at least 13, at least 14, at least 15, at least 16, at least 17, at least 18, at least 19, at least 20, at least 21, at least 22, at least 23, at least 24, at least 25, at least 26, at least 27, at least 28, at least 29, or at least 30. A sample expression profile may include polynucleotide expression level information for no greater than 30 polynucleotides chosen from SEQ ID NO:8-3,248, obtained from a biological sample from a subject, for instance, no greater than 30, no greater than 29, no greater than 28, no greater than 27, no greater than 26, no greater than 25, no greater than 24, no greater than 23, no greater than 22, no greater than 21, no greater than 20, no greater than 19, no greater than 18, no greater than 17, no greater than 16, no greater than 15, no greater than 14, no greater than 13, no greater than 12, no greater than 11, no greater than 10, no greater than 9, no greater than 8, no greater than 7, no greater than 6, or no greater than 5.

[0054] The skilled person will recognize that detecting a T21 biomarker present in a subject may not require use of an entire nucleotide sequence disclosed at any of SEQ ID NO:8-3,248. A nucleotide sequence used in a method provided herein is of a length that is at least substantially unique for a T21 biomarker to specifically hybridize with a RNA, such as a CFP RNA, present in a biological sample. A nucleotide sequence used in a method provided herein may be RNA, DNA, or RNA/DNA hybrid.

[0055] In one embodiment, a T21 biomarker present in a biological sample may be a polynucleotide that contains or consists of the sequence which defines the T21 biomarker target or complement thereof. The T21 biomarker may be identical to one of SEQ ID NOs:8-3,248, or can be a complement thereof, sense or antisense, as well as a sequence that hybridizes therewith under suitable conditions. In one embodiment, a T21 biomarker used to detect a RNA present in a biological sample, such as a CFP RNA, may be at least 15, at least 20, at least 25, at least 30, at least 35, or at least 40 nucleotides in length, and so on, of a sequence selected from SEQ ID NO:8-3,248, or the complement thereof. In one embodiment, a T21 biomarker may include a sequence selected from SEQ ID NO:8-3,248, or the complement thereof, that is from 15 nucleotides to the full sequence, from 16 nucleotides to 100 nucleotides, from 17 nucleotides to 50 nucleotides, from 18 nucleotides to 30 nucleotides, from 19 nucleotides to 25 nucleotides, or from 20 to 22 nucleotides. A T21 biomarker selected from SEQ ID NO:8-3,248 may have perfect identity, at least 95% identity, at least 90% identity, at least 85% identity, or at least 80% identity with a sequence disclosed herein. A T21 biomarker selected from SEQ ID NO:8-3,248 may have perfect complementarity or at least 95% complementarity, at least 90% complementarity, at least 85% complementarity, or at least 80% complementarity with a sequence disclosed herein. A T21 biomarker may be continuous or it can have one or more bulges or mismatches upon hybridization. A T21 biomarker used to detect a RNA in a biological sample may also include one or more chemical modifications, such as a 2′ carbon modification. A T21 biomarker may or may not form an overhang upon hybridization when detecting a RNA present in a biological sample.

[0056] “Hybridization” includes any process by which a strand of a nucleic acid sequence joins with a second nucleic acid sequence strand through base-pairing. Hybridization of polynucleotides is affected by such conditions as salt concentration, temperature, or organic solvents, in addition to the base composition, length of the complementary strands, and the number of nucleotide base mismatches between the hybridizing nucleic acids, as will be readily appreciated by those skilled in the art. Stringency conditions depend on the length and base composition of the nucleic acid, which can be determined by techniques well known in the art. Generally, stringency can be altered or controlled by, for example, manipulating temperature and salt concentration during hybridization and washing. For example, a combination of high temperature and low salt concentration increases stringency. The degree of stringency may be based, for example, on the calculated (estimated) melting temperature (Tₘ) of the polynucleotide. Calculation of Tₘ is well known in the art. For example, “maximum stringency” typically occurs at around Tₘ-5° C. (5° below the Tₘ of the probe); “high stringency” at around 5-10° below the Tₘ; “intermediate stringency” at around 10-20° below the Tₘ of the probe; and “low stringency” at around 20-25° below the Tₘ. Maximum stringency conditions may be used to identify a polynucleotide present in a biological sample having strict identity or near-strict identity with a T21 biomarker selected from SEQ ID NO:8-3,248; while high stringency conditions are used to identify a polynucleotide present in a biological sample having about 80% or more sequence identity with a T21 biomarker. Such conditions are known to those skilled in the art and can be found in, for example, Strauss, W. M. “Hybridization With Radioactive Probes,” in Current Protocols in Molecular Biology 6.3.1-6.3.6, (John Wiley & Sons, N.Y. 2000). Both aqueous and nonaqueous conditions as described in the art can be used.

[0057] Expression levels of any one or more of the T21 biomarkers described herein may be used to determine the presence, absence, or type of T21 in a subject. In one embodiment, expression levels of one or more T21 biomarkers encoded by chromosome 21 may be used to determine the presence, absence, or type of T21 in a subject. In one embodiment, expression levels of one or more T21 biomarkers encoded by the remaining 21 autosomes (chromosomes 1-22 exclusive of chromosome 21) and X may be used to determine the presence, absence, or type of T21 in a subject. In one embodiment, expression levels of one or more T21 biomarkers encoded by any combination of chromosomes 1-22 and X may be used to determine the presence, absence, or type of T21 in a subject. In one embodiment, expression levels of one or more T21 biomarkers encoded by one chromosome selected from 1-22 and X may be used to determine the presence, absence, or type of T21 in a subject. In one embodiment, expression levels of one or more T21 biomarkers that are mRNAs (SEQ ID NO:8-3,250) may be used to determine the presence, absence, or type of T21 in a subject. In one embodiment, expression levels of one or more T21 biomarkers that are small non-coding RNAs (SEQ ID NO:3,251-3,248) may be used to determine the presence, absence, or type of T21 in a subject. In one embodiment, the T21 biomarkers used may be those that are up-regulated in a pregnant mother carrying a fetus that is T21 when compared to a pregnant mother carrying a normal fetus. In one embodiment, the T21 biomarkers used may be those that are down-regulated in a in a pregnant mother carrying a fetus that is T21 when compared to a pregnant mother carrying a normal fetus. In one embodiment, the T21 biomarkers used may be a combination of those that are up-regulated and those that are down-regulated in a pregnant mother carrying a fetus that is T21 when compared to a pregnant mother carrying a normal fetus.

[0058] The number of T21 biomarkers used in an assay to determine the presence, absence, or type or T21 in a subject may vary. The skilled person will appreciate that, generally, the more biomarkers examined, the more accurate the determination of the presence, absence, or type of T21 in a subject; however, the skilled person will also appreciate that there is a minimum number of biomarkers useful for an accurate diagnosis of T21. In one embodiment, the number of T21 biomarkers evaluated in practicing a method provided herein may be at least 2, at least 3, at least 4, at least 5, at least 6, at least 7, at least 8, at least 9, at least 10, at least 11, at least 12, at least 13, at least 14, at least 15, at least 16, at least 17, at least 18, at least 19, at least 20, at least 21, at least 22, at least 23, at least 24, at least 25, at least 26, at least 27, at least 28, at least 29, or at least 30. In one embodiment, the number of T21 biomarkers evaluated in practicing a method provided herein may be no greater than 30, no greater than 29, no greater than 28, no greater than 27, no greater than 26, no greater than 25, no greater than 24, no greater than 23, no greater than 22, no greater than 21, no greater than 20, no greater than 19, no greater than 18, no greater than 17, no greater than 16, no greater than 15, no greater than 14, no greater than 13, no greater than 12, no greater than 11, no greater than 10, no greater than 9, no greater than 8, no greater than 7, no greater than 6, or no greater than 5. In one embodiment, the number of CFP RNAs detected varies depending upon whether the fetus or subject is normal or abnormal.

[0059] All the T21 biomarkers measured in a subject having T21 may not show altered expression levels when compared to a healthy subject. A subject may be considered to have T21 when at least 60%, at least 65%, at least 70%, at least 75%, at least 80%, at least 85%, at least 90%, at least 95%, or 100% of the T21 biomarkers in a sample expression profile from the subject's biological sample show altered expression when compared to those T21 biomarkers in a control expression profile from a healthy subject. For instance, in an embodiment where 10 biomarkers are measured in a biological sample from a subject, such as a pregnant mother carrying a fetus with T21, the subject may be considered to have T21 when at least 6 of the biomarkers in a sample expression profile show altered expression when compared to those T21 biomarkers in a control expression profile from a healthy subject. Some of the T21 biomarkers in a subject not having T21 may show altered expression levels when compared to another healthy subject. A subject may be considered not to have T21 when no greater than 40%, no greater than 35%, no greater than 30%, no greater than 25%, no greater than 20%, no greater than 15%, no greater than 10%, no greater than 5%, or none of the T21 biomarkers in a sample expression profile from the subject's biological sample show altered expression when compared to those T21 biomarkers in a control expression profile from another healthy subject. For instance, in an embodiment where 10 biomarkers are measured in a biological sample from a subject, such as a pregnant mother carrying a normal fetus, the subject may be considered to have a normal fetus when no more than 4 of the biomarkers in a sample expression profile show altered expression when compared to the normal range for the population of healthy fetuses.

[0060] Whether the expression level or quantity of a biomarker in a subject having T21 is greater than or less than the expression level or quantity of the biomarker in a healthy subject is determined using routine statistical methods by applying accepted confidence levels. The expression level or quantity of a T21 biomarker in a biological sample is considered to be altered if the difference in amount of the biomarker in a test sample is increased or decreased to a statistically significant degree compared to the amount of the biomarker in a control sample. The term “statistically significant” refers to a result, namely a difference in numbers of positive results between a test and a control that is not likely due to chance. The minimum chance level for statistical significance herein is 95% probability that the result is not due to chance, i.e., random variations in the data. A 95% confidence interval means that if the procedure for computing a 95% confidence interval is used over and over, 95% of the time the interval will contain the true parameter value. In one embodiment, the minimum chance level for statistical significance is 97% probability, 99% probability, or 99.9% probability. Various methods, as is known, can be used to calculate statistical significance. Examples include, but are not limited to, binomial probabilities, the Poisson distribution, chi-square, and t-test. The skilled person will recognize that one may use sufficient numbers of results to obtain a confidence interval of at least 95%, or higher, in order to determine statistical significance of a difference in expression level or quantity of a biomarker in a subject having T21 and the expression level or quantity of the biomarker in a healthy subject.

[0061] In one embodiment, a subject is considered to have T21 when comparison of expression of at least one T21 biomarker, or a plurality of T21 biomarkers, with the expression level of the at least one T21 biomarker, or a plurality of T21 biomarkers, in a biological sample from a subject not having T21 shows a difference, and that difference is indicative of the presence of T21 in the subject. In one embodiment, a subject is considered to have T21 when expression of at least one T21 biomarker, or a plurality of T21 biomarkers, is altered to a statistically significant degree in a biological sample from the subject compared to a biological sample from a subject not having trisomy 21. In one embodiment, a subject is considered to have T21 when comparison of expression of at least one T21 biomarker with the expression level of the at least one T21 biomarker in a biological sample from a subject not having T21 shows that the expression level or quantity of a biomarker in the subject is outside the 95% confidence interval for the biomarker. In one embodiment, a subject is considered to have T21 when comparison of expression of a plurality of T21 biomarkers with the expression level of the plurality of T21 biomarkers in a biological sample from a subject not having T21 shows that the expression level or quantity of the plurality of biomarker in the subject is outside the 95% confidence interval for the plurality of the biomarkers.

[0062] Accordingly, in one embodiment, a method provided herein includes measuring a plurality of T21 biomarkers in a biological sample obtained from a subject, such as a pregnant female. The plurality of T21 biomarkers measured may be selected from any combination of SEQ ID NO:8-3,248, or a complement thereof, or a portion thereof. The plurality of T21 biomarkers measured may be polynucleotides that hybridize to a sequence selected from any one of SEQ ID NO:8-3,248 under suitable conditions. In one embodiment, a method provided herein includes detecting T21 biomarkers in a biological sample to yield an expression level of each detected T21 biomarker. The T21 biomarkers may be selected from any combination of SEQ ID NO:8-3,248, or a complement thereof, or a portion thereof. The T21 biomarkers detected may be polynucleotides that hybridize to a sequence selected from any one of SEQ ID NO:8-3,248 under suitable conditions. The biological sample may include plasma from a pregnant female. In one embodiment, a method disclosed herein includes detecting T21 biomarkers in a biological sample to yield a sample expression profile. The T21 biomarkers may be selected from any combination of SEQ ID NO:8-3,248, or a complement thereof, or a portion thereof. The T21 biomarkers detected may be selected from SEQ ID NO:8-3,248, or a complement thereof, or a portion thereof. The T21 biomarkers detected may be polynucleotides that hybridize to a sequence selected from any one of SEQ ID NO:8-3,248 under suitable conditions. The biological sample may include plasma from a pregnant female.

[0063] In one embodiment, such as one where the subject is a pregnant female, a method disclosed herein may include identifying the fetus as i) having trisomy 21 if expression of the plurality of biomarkers is altered to a statistically significant degree in the biological sample compared to a biological sample from a second pregnant female carrying a fetus not having trisomy 21, or ii) not having trisomy 21 if expression of the plurality of biomarkers is not altered to a statistically significant degree in the biological sample compared to a biological sample from a second pregnant female carrying a fetus not having trisomy 21. In one embodiment, such as one where the subject is a pregnant female, the method may further include comparing the expression level of a detected T21 biomarker to the expression level of the T21 biomarker in pregnant females carrying a fetus without T21, wherein an expression level of a detected T21 biomarker that is outside the 95% confidence interval for that T21 biomarker indicates the expression level of the T21 biomarker is altered. In one embodiment, such as one where the subject is a pregnant female, the method may further include comparing the sample expression profile with a reference expression profile; wherein a difference between the sample expression profile and the reference expression profile is indicative of the presence or absence of trisomy 21 in the fetus.

[0064] In one embodiment, such as one where the fetus is diagnosed as having T21, a method may further include recommending to the pregnant female a genetic test chosen from amniocentesis, cordocentesis, and chorionic villus sampling, ultrasound, or a combination thereof.

[0065] Amounts of T21 biomarkers in a biological sample may be determined in absolute or relative terms. If expressed in relative terms, amounts can be expressed as normalized amounts with reference to one or more normalization sequences present in a biological sample.

[0066] It is expected that this method will have a sensitivity (percent of fetuses or subjects having T21 correctly identified, also referred to as detection rate) of at least 98%, at least 99%, or 100% when enough T21 biomarkers present in a biological sample are detected. It is also expected that this method will have a specificity (percent of fetuses or subjects not having T21 correctly identified) of at least 98%, at least 99%, or 100% when enough T21 biomarkers present in a biological sample are detected.

[0067] Measuring the expression level or quantity of any single T21 biomarker or a plurality of T21 biomarkers may be accomplished by use of techniques that are known in the art and routine. In one embodiment, the expression level or quantity of a T21 biomarker or a plurality of T21 biomarkers may be monitored directly by detecting RNA present in a biological sample. RNA may be obtained from a biological sample using routine techniques known in the art. In one embodiment, the RNA is cell-free RNA obtained from biological tissue and/or fluid. In one embodiment, the RNA is cell-free plasma RNA obtained from whole blood, blood plasma, or serum. In one embodiment, the RNA is isolated. As used herein, the term “isolated” refers to a polynucleotide that has been removed from its natural environment.

[0068] Detecting one or more T21 biomarkers that are present as a RNA polynucleotide may be accomplished by a variety of methods. Some methods are quantitative and allow estimation of the original levels of RNA between the levels present in a test sample and a control, such as a control expression level for a T21 biomarker and/or a control expression profile, whereas other methods are merely qualitative. In one embodiment, a method for detecting one or more T21 biomarkers may include the use of polynucleotides that are in solution, and may be in any format, including, but not limited to, the use of individual tubes or a high throughput device, such as a PCR-card.

[0069] Quantitative real-time PCR (QRT-PCR) may be used to measure the differential expression of any T21 biomarker in a test sample and a control. In QRT-PCR, the RNA template is generally reverse transcribed into cDNA, which is then amplified via a PCR reaction. The primers used for amplification may be selected by determining which T21 biomarker(s) described at SEQ ID NO:8-3,248 is to be amplified, and then designing primers using routine methods known in the art. The PCR amplification process is catalyzed by a thermostable DNA polymerase. Non-limiting examples of suitable thermostable DNA polymerases include Taq DNA polymerase, Pfu DNA polymerase, Tli (also known as Vent) DNA polymerase, Tfl DNA polymerase, and Tth DNA polymerase. The PCR process may include three steps (i.e., denaturation, annealing, and extension) or two steps (i.e., denaturation and annealing/extension). The temperature of the annealing or annealing/extension step may vary, depending upon the amplification primers and other parameters such as concentration. The temperature of the annealing or annealing/extending step may range from about 50° C. to about 75° C. The amount of PCR product is followed cycle-by-cycle in real time, which allows for determination of the initial concentrations of mRNA. The reaction may be performed in the presence of a dye that binds to double-stranded DNA, such as SYBR Green. The reaction may also be performed with fluorescent reporter probes, such as TAQMAN probes (Applied Biosystems, Foster City, Calif.) that fluoresce when the quencher is removed during the PCR extension cycle. Fluorescence values are recorded during each cycle and represent the amount of product amplified to that point in the amplification reaction. The cycle when the fluorescent signal is first recorded as statistically significant is the threshold cycle (Ct). To minimize errors and reduce any sample-to-sample variation, QRT-PCR is typically performed using one or more normalization sequences.

[0070] Reverse-transcriptase PCR (RT-PCR) may also be used to measure the expression of a T21 biomarker. As described above, the RNA template is reverse transcribed into cDNA, which is then amplified via a typical PCR reaction. After a set number of cycles the amplified DNA products are typically separated by gel electrophoresis. Comparison of the relative amount of PCR product amplified in different samples will reveal whether the expression of a T21 biomarker is altered in a test sample.

[0071] Expression of a T21 biomarker may also be measured using a nucleic acid microarray (also referred to in the art as a DNA chip or biochip). In this method, single-stranded polynucleotides selected from at least a portion of SEQ ID NO:8-3,248, or a complement thereof, are plated, or arrayed, on a solid support. The solid support may be a material such as, for instance, glass, silica-based, silicon-based, a synthetic polymer, a biological polymer, a copolymer, a metal, or a membrane. The form or shape of the solid support may vary, depending on the application. Suitable examples include, but are not limited to, slides, strips, plates, wells, microparticles, fibers (such as optical fibers), gels, and combinations thereof. The arrayed immobilized sequences are generally hybridized with specific DNA probes obtained from the test sample. As described above, RNA present in a sample, including T21 biomarkers, is generally reverse transcribed into cDNA. Fluorescently labeled cDNA probes may be generated through incorporation of fluorescently labeled deoxynucleotides during the reverse transcription step. The cDNA probes are hybridized to the immobilized nucleic acids on the solid support under highly stringent conditions. After stringent washing to remove non-specifically bound probes, the solid support is scanned using routine methods, for instance, by confocal laser microscopy or by another detection method, such as a CCD camera. Quantitation of hybridization of each arrayed element allows for assessment of corresponding RNA abundance. With multiple color fluorescence, separately labeled cDNA probes may be hybridized pairwise to the array. The relative abundance of the transcripts from the two sources corresponding to each specified T21 biomarker may then be determined simultaneously. Microarray analysis may be performed by commercially available equipment, following manufacturer's protocols, such as by using the Affymetrix GenChip technology, or Incyte's microarray technology.

[0072] Differential expression of a T21 biomarker may also be measured using Northern blotting. For this, RNA samples are first separated by size via electrophoresis in an agarose gel under denaturing conditions. The RNA is then transferred to a membrane, crosslinked, and hybridized, under highly stringent conditions, to a labeled DNA probe. After washing to remove the non-specifically bound probe, the hybridized labeled species are detected using routine techniques known in the art. The probe may be labeled with, for instance, a radioactive element, a chemical that fluoresces when exposed to ultraviolet light, a tag that is detected with an antibody, or an enzyme that catalyses the formation of a colored or a fluorescent product. A comparison of the relative amounts of RNA detected in a control sample and a test sample will reveal whether the expression of one or more T21 biomarkers or changed in the test sample.

[0073] Nuclease protection assays may also be used to monitor the altered expression of a T21 biomarker in a test sample and a control. In nuclease protection assays, an antisense probe hybridizes in solution to a RNA sample. The antisense probe may be labeled with an isotope, a fluorophore, an enzyme, or another tag. Following hybridization, nucleases are added to degrade the single-stranded, unhybridized probe and RNA. An acrylamide gel is used to separate the remaining protected double-stranded fragments, which are then detected using techniques well known in the art. Again, qualitative differences in expression may be detected.

[0074] In one embodiment, expression of a T21 biomarker may be examined in vivo in a subject. One or more RNA polynucleotides may be labeled with fluorescent dye, a bioluminescent marker, a fluorescent semiconductor nanocrystal, or a short-lived radioisotope, and then the subject may be imaged or scanned using a variety of techniques, depending upon the type of label.

[0075] In one embodiment, the detection of a RNA, such as a CFP RNA, uses the nucleotides of a specific exon as described in SEQ ID NO:8-3,248. Thus, if QRT-PCR is used to detect a specific CFP RNA, the primers used to amplify the CFP RNA will amplify all or a portion of an exon described in SEQ ID NO:8-3,248. If a microarray is used to detect a specific CFP RNA, the arrayed immobilized sequence used to detect the CFP RNA will be based on all or a portion of an exon described in SEQ ID NO:8-3,248, or a complement thereof. A person skilled in the art will know which parameters may be manipulated to optimize detection of a RNA of interest using one or more of the polynucleotides listed at SEQ ID NO:8-3,248.

[0076] When determining whether the expression of a T21 biomarker or a plurality of T21 biomarkers are altered in a test sample compared to a control expression level or a control expression profile, it can be helpful to use a normalization sequence. A normalization sequence is a polynucleotide that can be used to normalize the relative amounts of polynucleotides, and/or data obtained from the polynucleotides, from one sample to the next. A normalization sequence can be RNA that has an expression level or quantity that is generally stable under the conditions studied. That is, the normalization sequence can have an expression level or quantity that is substantially unaffected by physiological circumstances present in a subject, and thus the normalization sequence can be used to normalize the amount of polynucleotides in separate samples for comparison. The separate samples can be from different subjects or the same subject at different time points, such as different time points in pregnancy. For example, the normalization sequence can be used to normalize the amount of RNA in QRT-PCR studies, such as by normalizing the amount of a RNA sequence of interest. The normalization sequences described herein can be used alone or in combination, and may be used to normalize samples to be assayed for T21 biomarkers. Thus, the normalization sequences provided herein can be for quantification of cell-free RNA, including CFP RNA, present in a biological sample.

[0077] It has been determined that previously reported normalization sequences utilized in other tissues for quantification of isolated RNA (e.g., mRNA: 18s RNA, RPLP0, and GAPDH; miRNA: miR-103, miR-146a, and miR-197) were either expressed inconsistently in control plasma samples or were altered by either pregnancy, gestational age or disease (see Dong and Weiner, WO 12/075150). The normalization sequences described can include cell-free plasma RNA sequences (including coding sequences, e.g., mRNA, and/or non-coding sequences, e.g., miRNA) that are substantially unchanged by a condition. In one embodiment, the normalization sequences are substantially unchanged during the course of pregnancy.

[0078] Normalization sequences appropriate for use in the methods provided herein may be identified as described in Dong and Weiner (WO 12/075150). In one embodiment, the normalization sequence includes a circulating RNA. Such a normalization sequence can be described as human (i.e., Homo sapiens) peptidylprolyl isomerase A (i.e., cyclophilin A, rotmase A), which is encoded by a PPIA coding region. The normalization sequence can be an mRNA for peptidylprolyl isomerase. An example of a peptidylprolyl isomerase normalization sequence can be found at accession number: NM_{—}021130 and/or NM_{—}001008741. An example of a peptidylprolyl isomerase normalization sequence that may be useful for normalization of mRNA is depicted at SEQ ID NO: 1 (see FIG. 1). In one embodiment, the normalization sequence may include miRNA. Such a normalization sequence may be a Drosophila melanogaster small nuclear RNA, such as snRNA:U6. The snRNA:U6 normalization sequence can be snRNA:U6 at 96Aa, 96:Ab, and/or 96Ac. Examples of these normalization sequences include snRNA:U6:96Aa (SEQ ID NO: 2 for miRNA), snRNA:U6:96Ab (SEQ ID NO: 3 for miRNA), and/or snRNA:U6:96Ac (SEQ ID NO: 4 for miRNA) (see FIG. 1), and can be found at the following accession numbers, respectively: NR_{—}002081 (snRNA:U6:96Aa); NR_{—}002082 (snRNA:U6:96Ab); and NR_{—}002083 (snRNA:U6:96Ac). Accordingly, SEQ ID NO:1 may be used for normalization of mRNA, and SEQ ID NOs: 2-4 may be used for normalization of miRNA. More than one normalization sequence may be used.

[0079] Primers and probes for these sequences can be readily obtained by one of ordinary skill in the art. For example, sequences for the forward primer, reverse primer, and probe for

[0080] SEQ ID NO:1 (e.g., for an mRNA normalization sequence) may be: Forward primer: GCTTTGGGTCCAGGAATGG (SEQ ID NO:5); Reverse primer: GTTGTCCACAGTCAGCAATGGT (SEQ ID NO:6); and Probe: AGACCAGCAAGAAGAT (SEQ ID NO:7). These polynucleotides may also be used as normalization sequences in the methods provided herein.

[0081] In one embodiment, a normalization sequence may be a polynucleotide that contains or consists of the sequence. The normalization sequence can be identical to one of SEQ ID NO:1-7, or can be a complement thereof, sense or antisense, as well as a sequence that hybridizes therewith under suitable conditions. In one embodiment, a normalization sequence may include a sequence selected from SEQ ID NO:1-7, or the complement thereof, that is at least 15 nucleotides, at least 20 nucleotides, at least 25 nucleotides, at least 30 nucleotides, at least 35 nucleotides, at least 40 nucleotides, at least 45 nucleotides, at least 50 nucleotides, or at least 55 nucleotides, to the full sequence. In one embodiment, the normalization sequence can include a sequence of SEQ ID NO:1, 2, 3, 4, 5, 6, or 7. A normalization sequence may have perfect identity, at least 95% identity, at least 90% identity, at least 85% identity, or at least 80% identity with a sequence selected from SEQ ID NO:1-7. A normalization sequence may have perfect complementarity or at least 95% complementarity, at least 90% complementarity, at least 85% complementarity, or at least 80% complementarity with a sequence selected from SEQ ID NO:1-7. A normalization sequence may be continuous or it can have one or more bulges or mismatches upon hybridization. A normalization sequence may also include one or more chemical modifications, such as a 2′ carbon modification. A normalization sequence may or may not form an overhang upon hybridization when detecting a RNA present in a biological sample.

[0082] Provided herein is an article that includes a substrate and a plurality of individual polynucleotides. The individual polynucleotides may be selected from SEQ ID NO:8-3,248, or a complement thereof, or a portion thereof. The polynucleotides are immobilized onto a surface of the substrate. In one embodiment, the polynucleotides are immobilized on the substrate surface to form a microarray.

[0083] Provided herein are kits. A kit may include one or more polynucleotides for measuring the expression of at least one T21 biomarker, wherein alteration in the expression of the one or more T21 biomarkers in a subject relative to a control is indicative of the presence, absence, or type of T21. A kit may include one or more polynucleotides that are specific to a selected T21 biomarker

[0084] A polynucleotide present in a kit may have a sequence that is identical to a polynucleotide listed at SEQ ID NO:8-3,248, or the complement thereof In one embodiment, polynucleotide present in a kit may have a portion of a sequence that is identical to a polynucleotide listed at SEQ ID NO:8-3,248, or the complement thereof The polynucleotides to be used in the measurement of the expression of one or more T21 biomarkers can, depending upon the type of technique to be used. For example, the kit may include polynucleotides useful as primers for QRT-PCR. Polynucleotides useful as probes may be included in a kit and are optionally provided together with a solid substrate, such as but not limited to a bead, a chip, a plate, and a microarray. Polynucleotides may be immobilized on the surface of such a substrate. A kit may also further include a reverse transcriptase, a thermostable DNA polymerase , appropriate buffers and salts, or the combination thereof

[0085] Additional reagents useful in the methods described herein, for example determining the presence, absence, or type of T21 in a subject, may be provided in a kit. Depending on the technique or procedure, the kit may further include one or more additional reagents such as, but not limited to, buffers such as amplification buffers, hybridization buffers, labeling buffers, or any equivalent reagent. Reagents may be supplied in solid (e.g., lyophilized) or liquid form, and these may optionally be provided in individual packages using containers such as vials, packets, bottles and the like, for each individual reagent. Each component can for example be provided in an amount appropriate for direct use or may be provided in a reduced or concentrated form that can be reconstituted.

[0086] A kit may further include materials and tools useful for carrying out methods described herein. A kit can be used for example in diagnostic laboratories, clinical settings, or research settings. The kit may further include instructions for use, including for example any procedural protocols and instructions for using the various reagents in the kit for performing different steps of the process. Instructions for using the kit according to one or more methods of the invention may include instructions for processing a biological sample obtained from a subject and/or for performing the test, and instructions for analyzing or interpreting the results. Instructions may be provided in printed form or stored on any computer readable medium including but not limited to DVDs, CDs, hard disk drives, magnetic tape and servers capable of communicating over computer networks. A kit may further include one or more normalization sequences.

[0087] It will be understood that generally, components of a kit are conveniently packaged or bound together for ease of handling in commercial distribution and sale.

[0088] The present invention is illustrated by the following examples. It is to be understood that the particular examples, materials, amounts, and procedures are to be interpreted broadly in accordance with the scope and spirit of the invention as set forth herein.

### EXAMPLE 1

### T21 Cell Free Plasma Biomarker Confirmation Protocol

[0089] Presented here is an example of an assay that was used to confirm the microarray biomarker identification for those biomarkers identified as altered in pregnant mothers carrying a fetus that has trisomy 21. More than 1 million exon clusters and 1769 non-coding small RNAs were screened by Affymetrix GeneChip Human Exon ST and Affymetrix

[0090] GeneChip miRNA Arrays, respectively. A total of 3143 mRNA biomarkers (38 encoded by chromosome 21, 3105 encoded by a chromosome other than 21) and 98 non-coding small RNAs (miRNA and snoRNA) were identified as informative. Fifteen of these markers (10 from a gene on chromosome 21 and 5 from one of the other autosomes) were selected for confirmation based on their predictive profiles. These data confirm that the microarray analysis functioned as designed and identified biomarkers that were informative of the trisomy 21 status of a fetus.

[0091] Blood Plasma Cell Free RNA isolation. A blood sample was taken from pregnant mothers at approximately 12-16 weeks of pregnancy. The blood sample was spun 200×g for 5 minutes, at 4° C., to separate the cells from plasma. Plasma was transferred to eight tubes (250 microliters (ul) per tube). TRIzol LS (Invitrogen, Grand Island, N.Y., Cat. no 10296-010) (750 ul) was added to each tube, shaken vigorously, and incubated for 5 minutes at room temperature. Two hundred microliters of chloroform were added to each tube, shaken vigorously, and incubated for 10 minutes at room temperature. The tubes were centrifuged at 10,000×g for 15 minutes at 4° C. The resulting upper phase contained RNA, and the lower phase contained DNA and protein.

[0092] The upper aqueous phase (300 ul/tube) was transferred to a new tube. Thirty microliters of 3M Sodium acetate (Ambion, Grand Island, N.Y., cat. No. AM9740), p11:5.5, and 3 volumes of 100% ice cold EtOH (Sigma, St. Louis, Mo., cat. no. E702) (900 ul) were added and the tubes incubated at −20° C., overnight. After centrifugation at 12,000×g for 75 minutes (4° C.), all liquid was carefully removed. The pellet was washed with 50 ul per tube with ice cold 80% EtOH, and all the tubes from one patient were combined into one tube. This tube was centrifuged for 60 minutes at 12,000×g at 4° C. All liquid was removed, and the tube was incubated at 37° C. for 40 minutes.

[0093] The pellet was suspended in 20 to 40 ul of Diethylpyrocarbonate-(Sigma, cat. no. D5758) (DEPC) treated water, incubated at 56° C. for 10 minutes to dissolve the RNA, then transferred to ice for 30 minutes.

[0094] RNA concentration. RNA concentration was measured by using a Qubit® 2.0 Fluorometer (Life Technologies, Grand Island, N.Y.) as recommended by the manufacturer. Briefly, calibration of the Qubit® 2.0 Fluorometer was done using Standard #1 and #2. Working solution was prepared by diluting the Qubit™ RNA reagent at 1:200 in Qubit™ RNA buffer. Working solution (190 ul) and 10 ul of standard or RNA sample were mixed, then incubate at room temperature for 2 minutes. The RNA concentration was determined.

[0095] Reverse Transcription. Reverse transcription (RT) of the RNA was prepared using a SuperScript® VILO cDNA synthesis kit (Life Technologies, cat. no. 11755050) and ERCC RNA Spike-in control mixes (Life Technologies, cat. no. 11755050) diluted 1:100. Each RT reaction contained SuperScript® VILO™ MasterMix (4 ul), ERCC RNA Spike-in control (2 ul), 1,000 nanograms (ng) RNA, and H₂O to a final volume of 20 ul. The RT reaction was run using the following conditions: step 1 was 25° C., 10 minutes; step 2 was 42° C., 60 minutes; and step 3 was 85° C., 5 minutes. After the cDNA was produced the tubes were held at 4 until transfer to −20° C.

[0096] Preamplification. Preamplification of cDNAs to expand the signal were prepared by mixing a preamplification reaction in a 0.2 ml PCR tube as follows: cDNA, 100 ng; PreAmp Mix (ABI, cat. no. 4391128), 15 ul; probes, final concentration of 100 nM; H₂O to a final volume of 30 ul. The preamplification reaction was run using the following conditions: the reaction was held at 95° C. for 10 minutes, and then cycled through 14 cycles of 95° C. for 15 seconds followed by 60° C. for 15 seconds. The reaction was then held at 99.9° C. for 10 minutes, transferred to 4° C., and then stored at −20 ° C.

[0097] Real-time PCR: PCR reactions were prepared by mixing 10 ul of a preamplified reaction, 45 ul of H₂O, and 55 ul of TaqMan Universal PCR Master Mix (ABI, cat. no. 4440040). The thermal cycling reaction was run using the following conditions: the reaction was held at 50° C. for 2 minutes, held at 95° C. for 10 minutes, and then cycled through 40 cycles of 95° C. for 15 seconds followed by 60° C. for 1 minute.

[0098] Data analysis. For the initial analysis, the 95% confidence interval for expression (normalized to the described normalization sequences) of each of the fifteen (15) selected T21 markers at 12 weeks gestation was calculated (FIG. 5, area between the dotted lines of each graph). Expression levels of the fifteen T21 biomarkers were then measured and plotted (squares) against the normal range for 10 affected pregnancies at 12 weeks gestation.

[0099] The complete disclosure of all patents, patent applications, and publications, and electronically available material (including, for instance, nucleotide sequence submissions in, e.g., GenBank and RefSeq, and amino acid sequence submissions in, e.g., SwissProt, PIR, PRF, PDB, and translations from annotated coding regions in GenBank and RefSeq) cited herein are incorporated by reference in their entirety. Supplementary materials referenced in publications (such as supplementary tables, supplementary figures, supplementary materials and methods, and/or supplementary experimental data) are likewise incorporated by reference in their entirety. In the event that any inconsistency exists between the disclosure of the present application and the disclosure(s) of any document incorporated herein by reference, the disclosure of the present application shall govern. The foregoing detailed description and examples have been given for clarity of understanding only. No unnecessary limitations are to be understood therefrom. The invention is not limited to the exact details shown and described, for variations obvious to one skilled in the art will be included within the invention defined by the claims.

[0100] Unless otherwise indicated, all numbers expressing quantities of components, molecular weights, and so forth used in the specification and claims are to be understood as being modified in all instances by the term “about.” Accordingly, unless otherwise indicated to the contrary, the numerical parameters set forth in the specification and claims are approximations that may vary depending upon the desired properties sought to be obtained by the present invention. At the very least, and not as an attempt to limit the doctrine of equivalents to the scope of the claims, each numerical parameter should at least be construed in light of the number of reported significant digits and by applying ordinary rounding techniques.

[0101] Notwithstanding that the numerical ranges and parameters setting forth the broad scope of the invention are approximations, the numerical values set forth in the specific examples are reported as precisely as possible. All numerical values, however, inherently contain a range necessarily resulting from the standard deviation found in their respective testing measurements.

[0102] All headings are for the convenience of the reader and should not be used to limit the meaning of the text that follows the heading, unless so specified.

What is claimed is:

1. A method for screening a fetus for trisomy 21 comprising:
measuring a plurality of T21 biomarkers in a biological sample obtained from a first pregnant female, wherein the plurality of T21 biomarkers comprise polynucleotides chosen from SEQ ID NO:8-3,248, or a complement thereof; and
identifying the fetus as i) having trisomy 21 if expression of the plurality of biomarkers is altered to a statistically significant degree in the biological sample compared to a biological sample from a second pregnant female carrying a fetus not having trisomy 21, or ii) not having trisomy 21 if expression of the plurality of biomarkers is not altered to a statistically significant degree in the biological sample compared to a biological sample from a second pregnant female carrying a fetus not having trisomy 21.

2. The method of claim 1 wherein the plurality of T21 biomarkers comprises at least 10 polynucleotides chosen from SEQ ID NO:8-3,248, or a complement thereof, and wherein the first pregnant mother having at least 6 biomarkers altered to a statistically significant degree is identified as carrying a fetus having trisomy 21.

3. The method of claim 1 wherein the plurality of T21 biomarkers comprises at least 10 polynucleotides chosen from SEQ ID NO:8-3,248, or a complement thereof, and wherein the first pregnant mother having no greater than 4 biomarkers altered to a statistically significant degree is identified as carrying a fetus not having trisomy 21.

4. The method of claim 1 wherein the T21 biomarkers are selected from polynucleotides encoded by chromosome 21.

5. The method of claim 1 wherein the T21 biomarkers are selected from polynucleotides encoded by any of chromosomes 1-20, 22 or X.

6. The method of claim 1 wherein the T21 biomarkers are selected from polynucleotides encoded by any of chromosomes 1-20, 22 or X.

7. The method of claim 1 wherein the T21 biomarkers are selected from polynucleotides that are up-regulated in the first pregnant female carrying a fetus with trisomy 21 compared to the second pregnant female carrying a fetus not having trisomy 21.

8. The method of claim 1 wherein the T21 biomarkers are selected from polynucleotides that are down-regulated in the first pregnant female carrying a fetus with trisomy 21 compared to the second pregnant female carrying a fetus not having trisomy 21.

9. The method of claim 1 wherein expression of a T21 biomarker is altered to a statistically significant degree if it is outside the 95% confidence interval for that T21 biomarker.

10. The method of claim 1 wherein the method further comprises obtaining the biological sample from the first pregnant female.

11. The method of claim 1 wherein the obtaining comprises obtaining a blood sample.

12. The method of claim 11 wherein the blood sample is processed to remove cells from the blood sample.

13. The method of claim 11 wherein the blood sample is processed to isolate cell free plasma RNA.

14. The method of claim 1 wherein the method further comprises converting RNA polynucleotides present in the biological sample into cDNA molecules.

15. The method of claim 14 wherein the measuring comprises hybridization between a cDNA molecule and a complementary T21 biomarker.

16. The method of claim 15 wherein the complementary T21 biomarker is in solution during the hybridization.

17. The method of claim 15 wherein the complementary T21 biomarker is immobilized on a solid support.

18. The method of claim 1 wherein the fetus is identified as having trisomy 21, the method further comprising recommending a genetic test chosen from amniocentesis, cordocentesis, and chorionic villus sampling, ultrasound, or a combination thereof.

19. The method of claim 1 wherein the fetus of the first pregnant female is between 8 weeks and 16 weeks post-implantation.

20. A method for detecting trisomy 21 in a fetus comprising:
detecting T21 biomarkers in a biological sample to yield an expression level of each detected T21 biomarker, wherein the biological sample comprises plasma from a pregnant female, wherein the T21 biomarkers are selected from SEQ ID NO:8-3,248, or a complement thereof; and
comparing the expression level of a detected T21 biomarker to the expression level of the T21 biomarker in pregnant females carrying a fetus without T21, wherein an expression level of a detected T21 biomarker that is outside the 95% confidence interval for that T21 biomarker indicates the expression level of the T21 biomarker is altered.

21. The method of claim 20 wherein at least 10 T21 biomarkers are detected.

22. The method of claim 21 wherein a fetus carried by the pregnant female is identified as carrying a fetus having T21 when at least 6 biomarkers are outside the 95% confidence interval.

23. The method of claim 20 wherein the T21 biomarkers are selected from polynucleotides encoded by chromosome 21.

24. The method of claim 20 wherein the T21 biomarkers are selected from polynucleotides encoded by any of chromosomes 1-20, 22, or X.

25. The method of claim 20 wherein the T21 biomarkers are selected from polynucleotides encoded by any of chromosomes 1-20, 22, or X.

26. The method of claim 20 wherein the T21 biomarkers are selected from polynucleotides that are up-regulated in the pregnant female carrying a fetus with trisomy 21 compared to the pregnant females carrying a fetus not having trisomy 21.

27. The method of claim 20 wherein the T21 biomarkers are selected from polynucleotides that are down-regulated in the first pregnant female carrying a fetus with trisomy 21 compared to the pregnant females carrying a fetus not having trisomy 21.

28. The method of claim 20 wherein expression of a T21 biomarker is altered to a statistically significant degree if it is outside the 95% confidence interval for that T21 biomarker.

29. The method of claim 20 wherein the method further comprises obtaining the biological sample from the pregnant female.

30. The method of claim 29 wherein the obtaining comprises obtaining a blood sample.

31. The method of claim 30 wherein the blood sample is processed to remove cells from the blood sample.

32. The method of claim 30 wherein the blood sample is processed to isolate cell free plasma RNA.

33. The method of claim 20 wherein the method further comprises converting RNA polynucleotides present in the biological sample into cDNA molecules.

34. The method of claim 33 wherein the detecting comprises hybridization between a cDNA molecule and a complementary T21 biomarker.

35. The method of claim 34 wherein the complementary T21 biomarker is in solution during the hybridization.

36. The method of claim 34 wherein the complementary T21 biomarker is immobilized on a solid support.

37. The method of claim 20 further comprising recommending a genetic test chosen from amniocentesis, cordocentesis, and chorionic villus sampling, ultrasound, or a combination thereof.

38. The method of claim 20 wherein the fetus of the pregnant female is between 8 weeks and 16 weeks post-implantation.

39. A method for detecting trisomy 21 in a fetus comprising:
detecting T21 biomarkers in a biological sample from a pregnant female to yield a sample expression profile, wherein the T21 biomarkers are selected from SEQ ID NO:8-3,248, or a complement thereof; and
comparing the sample expression profile with a reference expression profile; wherein a difference between the sample expression profile and the reference expression profile is indicative of the presence or absence of T21 in the fetus.

40. The method of claim 39 herein the reference expression profile is from at least one second pregnant female carrying a fetus without T21, and wherein a difference between the sample expression profile and the reference expression profile is indicative of the presence of T21.

41. The method of claim 39 wherein the reference expression profile is from at least one second pregnant female carrying a fetus with T21, and wherein a difference between the sample expression profile and the reference expression profile is indicative of the absence of T21.

42. The method of claim 39 wherein the sample expression profile comprises at least 10 polynucleotides chosen from SEQ ID NO:8-3,248, or a complement thereof, wherein the difference between the sample expression profile and the reference expression profile is statistically significant

43. The method of claim 39 wherein the T21 biomarkers are selected from polynucleotides encoded by chromosome 21.

44. The method of claim 39 wherein the T21 biomarkers are selected from polynucleotides encoded by any of chromosomes 1-20, 22, or X.

45. The method of claim 39 wherein the T21 biomarkers are selected from polynucleotides encoded by any of chromosomes 1-20, 22, or X.

46. The method of claim 39 wherein the T21 biomarkers are selected from polynucleotides that are up-regulated in the first pregnant female carrying a fetus with T21 compared to the second pregnant female carrying a fetus not having T21.

47. The method of claim 39 wherein the T21 biomarkers are selected from polynucleotides that are down-regulated in the first pregnant female carrying a fetus with T21 compared to the second pregnant female carrying a fetus not having T21.

48. The method of claim 39 wherein the difference between the sample expression profile and the reference expression profile is statistically significant

49. The method of claim 39 wherein the method further comprises obtaining the biological sample from the first pregnant female.

50. The method of claim 49 wherein the obtaining comprises obtaining a blood sample.

51. The method of claim 50 wherein the blood sample is processed to remove cells from the blood sample.

52. The method of claim 50 wherein the blood sample is processed to isolate cell free plasma RNA.

53. The method of claim 39 wherein the method further comprises converting RNA polynucleotides present in the biological sample into cDNA molecules.

54. The method of claim 53 wherein the detecting comprises hybridization between a cDNA molecule and a complementary T21 biomarker.

55. The method of claim 54 wherein the complementary T21 biomarker is in solution during the hybridization.

56. The method of claim 54 wherein the complementary T21 biomarker is immobilized on a solid support.

57. The method of claim 39 wherein the fetus is identified as having trisomy 21, the method further comprising recommending a genetic test chosen from amniocentesis, cordocentesis, and chorionic villus sampling, ultrasound, or a combination thereof.

58. The method of claim 39 wherein the fetus of the first pregnant female is between 8 weeks and 16 weeks post-implantation.

59. An article comprising:
a substrate; and
a plurality of different polynucleotides selected from SEQ ID NO:8-3,248, or a complement thereof, wherein the polynucleotides are immobilized onto a surface of the substrate.

60. The article of claim 59 wherein the polynucleotides are immobilized on the substrate surface to form a microarray.

61. The article of claim 59 wherein at least 10 polynucleotides are immobilized on the substrate surface

62. A kit for diagnosis trisomy 21 in a subject comprising:
an article comprising a substrate and a plurality of polynucleotides selected from SEQ ID NO:8-3,248, or a complement thereof, wherein the polynucleotides are immobilized onto a surface of the substrate; and
packaging materials and instructions for use.

63. The kit of claim 62 wherein the polynucleotides are immobilized on the substrate surface to form a microarray.

The application's sequence listing, which the Patent Office published only in electronic form, follows.

SEQUENCE LISTING (3248 sequences)

SEQ ID NO: 1 - DNA, 2276 bp, Artificial Sequence
  Description of Artificial Sequence: Synthetic polynucleotide
gaacgtggtataaaaggggcgggaggccaggctcgtgccgttttgcagacgccaccgccgaggaaaaccgtgtactattagccatggtcaaccccaccgtgttcttcgacattgccgtcgacggcgagcccttgggccgcgtctcctttgagctgtttgcagacaaggtcccaaagacagcagaaaattttcgtgctctgagcactggagagaaaggatttggttataagggttcctgctttcacagaattattccagggtttatgtgtcagggtggtgacttcacacgccataatggcactggtggcaagtccatctatggggagaaatttgaagatgagaacttcatcctaaagcatacgggtcctggcatcttgtccatggcaaatgctggacccaacacaaatggttcccagtttttcatctgcactgccaagactgagtggttggatggcaagcatgtggtgtttggcaaagtgaaagaaggcatgaatattgtggaggccatggagcgctttgggtccaggaatggcaagaccagcaagaagatcaccattgctgactgtggacaactcgaataagtttgacttgtgttttatcttaaccaccagatcattccttctgtagctcaggagagcacccctccaccccatttgctcgcagtatcctagaatctttgtgctctcgctgcagttccctttgggttccatgttttccttgttccctcccatgcctagctggattgcagagttaagtttatgattatgaaataaaaactaaataacaattgtcctcgtttgagttaagagtgttgatgtaggctttattttaagcagtaatgggttacttctgaaacatcacttgtttgcttaattctacacagtacttagattttttttactttccagtcccaggaagtgtcaatgtttgttgagtggaatattgaaaatgtaggcagcaactgggcatggtggctcactgtctgtaatgtattacctgaggcagaagaccacctgagggtaggagtcaagatcagcctgggcaacatagtgagacgctgtctctacaaaaaataattagcctggcctggtggtgcatgcctagtcctagctgatctggaggctgacgtgggaggattgcttgagcctagagtgagctattatcatgccactgtacagcctgggtgttcacagatcttgtgtctcaaaggtaggcagaggcaggaaaagcaaggagccagaattaagaggttgggtcagtctgcagtgagttcatgcatttagaggtgttcttcaagatgactaatgtcaaaaattgagacatctgttgcggttttttttttttttttttcccctggaatgcagtggcgtgatctcagctcactgcagcctccgcctcctgggttcaagtgattctagtgcctcagcctcctgagtagctgggataatgggcgtgtgccaccatgcccagctaatttttgtatttttagtatagatggggtttcatcattttgaccaggctggtctcaaactcttgacctcagctgatgcgcctgccttggcctcccaaactgctgagattacagatgtgagccaccgcaccctacctcattttctgtaacaaagctaagcttgaacactgttgatgttcttgagggaagcatattgggctttaggctgtaggtcaagtttatacatcttaattatggtggaattcctatgtagagtctaaaaagccaggtacttggtgctacagtcagtctccctgcagagggttaaggcgcagactacctgcagtgaggaggtactgcttgtagcatatagagcctctccctagctttggttatggaggctttgaggttttgcaaacctgaccaatttaagccataagatctggtcaaagggatacccttcccactaaggacttggtttctcaggaaattatatgtacagtgcttgctggcagttagatgtcaggacaatctaagctgagaaaaccccttctctgcccaccttaacagacctctagggttcttaacccagcaatcaagtttgcctatcctagaggtggcggatttgatcatttggtgtgttgggcaatttttgttttactgtctggttccttctgcgtgaattaccaccaccaccacttgtgcatctcagtcttgtgtgttgtctggttacgtattccctgggtgataccattcaatgtcttaatgtacttgtggctcagacctgagtgcaaggtggaaataaacatcaaacatcttttcatta

SEQ ID NO: 2 - DNA, 107 bp, Artificial Sequence
  Description of Artificial Sequence: Synthetic polynucleotide
gttcttgcttcggcagaacatatactaaaattggaacgatacagagaagattagcatggcccctgcgcaaggatgacacgcaaaatcgtgaagcgttccacattttt

SEQ ID NO: 3 - DNA, 107 bp, Artificial Sequence; identical to SEQ ID NO: 2
  Description of Artificial Sequence: Synthetic polynucleotide

SEQ ID NO: 4 - DNA, 107 bp, Artificial Sequence; identical to SEQ ID NO: 2
  Description of Artificial Sequence: Synthetic polynucleotide

SEQ ID NO: 5 - DNA, 19 bp, Artificial Sequence
  Description of Artificial Sequence: Synthetic oligonucleotide
gctttgggtccaggaatgg

SEQ ID NO: 6 - DNA, 22 bp, Artificial Sequence
  Description of Artificial Sequence: Synthetic oligonucleotide
gttgtccacagtcagcaatggt

SEQ ID NO: 7 - DNA, 16 bp, Artificial Sequence
  Description of Artificial Sequence: Synthetic oligonucleotide
agaccagcaagaagat

SEQ ID NO: 8 - DNA, 70 bp, Homo sapiens
ccatgggcaattggcagatcaagcgccagaatggagatgatcccttgctgacttaccggttcccaccaaa

SEQ ID NO: 9 - DNA, 76 bp, Homo sapiens
agtgggaccggctcttggtcctgtacccaacgtccttggccattttctccgaggagctggacgggctttgcttcaa

SEQ ID NO: 10 - DNA, 115 bp, Homo sapiens
gggcggcgctaggcctgggcacgctggcgctgtgcggggcggcgctgctctacctggcgcgctgcgcggccgagcccggggaccccagggcgatgtcgggccgcagcccgcctcc

SEQ ID NO: 11 - DNA, 106 bp, Homo sapiens
tggatacacctgcggaactggagctccgtggggctgcccgccagggcgcccgggggaccaggggcagcctcggcctcgcgcatttcctccgccatgcgcgccagac

SEQ ID NO: 12 - DNA, 46 bp, Homo sapiens
cagtccaggaagtctgttaggcggccgttctgggtgatgtaggaga

SEQ ID NO: 13 - DNA, 26 bp, Homo sapiens
gatgggccactcggaggggggctcac

SEQ ID NO: 14 - DNA, 77 bp, Homo sapiens
cagcgccagcgtgtagcctcctcccaggatccggagcaggagggtggctgtcttttgcgttcaatccgctgggctgc

SEQ ID NO: 15 - DNA, 26 bp, Homo sapiens
atctgtgaactcggcacagccctgct

SEQ ID NO: 16 - DNA, 176 bp, Homo sapiens
ctctgggactttcgagtcggttggtgcacttgcgggggcccagcaggggtacgttcgtgacgggctatttggcaaagacagccattctccccttctcctccggtaagagtctttgccagcacattgcgcttcttgtctctgtgtggcctggtgtggccgggccgtgtaaccaagct

SEQ ID NO: 17 - DNA, 91 bp, Homo sapiens
ctgtttgcggggacggtcggtgcagctgcaaggctggaggcggccggcaggtgcccggtgctggctgcagatgcggcgctaaccttctctc

SEQ ID NO: 18 - DNA, 129 bp, Homo sapiens
tataggtgatggtgcgcatggtcacggggtggccccggataaagaagcctccaaagtacacgcggtccaggctgtgcagccgtgcgtggaggcaggccagctgcccaatgtcgttgctgatcatgtgca

SEQ ID NO: 19 - DNA, 87 bp, Homo sapiens
ttcgttttggtgagcagagcgccaagcccccagaaggtgccgcctccaatggagctgccgccgacccactcgaacctgtcctccgtc

SEQ ID NO: 20 - DNA, 127 bp, Homo sapiens
aggactacgcccagatgaaccacatccaggtggagaagatagagccgtctgagctccctctgcccgggggcggcaaccgtagctcctccgtgccccaccccttccaggtgaccctgcttcgcaacag

SEQ ID NO: 21 - DNA, 52 bp, Homo sapiens
cccgtgtgatgccagactgcacacagcaaggctgccacgtccgtggcctcgg

SEQ ID NO: 22 - DNA, 115 bp, Homo sapiens
gccggtcctctcgcccatgaacaaggtgcacgggggcatgaacaagctgccctccgtcaaccagctggtgggccagcctcccccgcacagttcggcagctacacccaacctgggg

SEQ ID NO: 23 - DNA, 34 bp, Homo sapiens
gtgtcttctgctggaccggcaccttttgtttgtc

SEQ ID NO: 24 - DNA, 295 bp, Homo sapiens
ccgtctgcagagcgagcgctcagacggagcccccgggcaacttgagtggcgccgatcggcggcggagcctctggcagagccccccgacccggcagcgcggaggggactcgcgtccgtccgcgtcgcgtcaccccaaaccctaagcagcgccgccccatcggcgcggagctccggctggaggcaagagccgcgcgccgggagacacgcaccgtgagcggcagcgccgccggcctccctcctcgccgccccggagggcgaagccgcggctccccagccctttgctgcgccgcgacag

SEQ ID NO: 25 - DNA, 27 bp, Homo sapiens
tgggtctcacagatgacgttcgggtcg

SEQ ID NO: 26 - DNA, 56 bp, Homo sapiens
aatgagggagtcagctccgtgctcctgggggcctccaatgcggaccagctcatgga

SEQ ID NO: 27 - DNA, 87 bp, Homo sapiens
cacacgcggcagaactccatgtggtcgtcctcctcctcctcgcagccgccctcctcctcttcatcgtcgtcgtccttcggctcccac

SEQ ID NO: 28 - DNA, 61 bp, Homo sapiens
ggtgcggcacagcgccgccgaggaggaggacgctatccacgccctcttcggcagcatgcag

SEQ ID NO: 29 - DNA, 66 bp, Homo sapiens
acaggcctcgcagaggttgaggggcccccggcggtgcagctgctggcagtcggcgtggtgacatac

SEQ ID NO: 30 - DNA, 624 bp, Homo sapiens
cggctccttcgtccagcacagtgtgagggttctgcaggagctcaacaagcagcgggagaagggccagtactgcgacgccactctggacgtggggggcctggtgtttaaggcacactggagtgtccttgcctgctgcagtcactttttccagagcctctacggggatggctcagggggcagtgtcgtcctccctgctggcttcgctgagatctttggcctcttgttggactttttctacactggtcacctcgctctcacctcagggaaccgggatcaggtgctcctggcagccagggagttgcgagtgccagaggccgtagagctgtgccagagcttcaagcccaaaacttcagtgggacaggcagcaggtggccagagtgggctggggccccctgcctcccagaatgtgaacagccacgtcaaggagccggcaggcttggaagaagaggaagtttcgaggactctgggtctagtccccagggatcaggagcccagaggcagtcatagtcctcagaggccccagctccattccccagctcagagtgagggcccctcctccctctgtgggaaactgaagcaggccttgaagccttgtccccttgaggacaagaaacccgaggactg

SEQ ID NO: 31 - DNA, 387 bp, Homo sapiens
acatgagtccgtttagagtcgcagtcttgggggcgaaggaccagggcgggagctggccgcagtccaccagcgaccacaggtcggtgtccgggtcgtagcactgcatcaccatggtctccttgccagccagggagccgatggcatagagccggccacggcacgcagtggtggagcagttgtccatggggtaggtcatgggctgcagggcctcccaggagtcagtggtgtggtcatagcgctcggtgctgtcggcggccaccacgtacagcagtccgtccagcacagaggagctgtggtactcgcgggccttcagcatgggcgccacctccgcccactcattcacgcttgagttgtacctccacacgcagtcatagagccgggagccat

SEQ ID NO: 32 - DNA, 97 bp, Homo sapiens
cactgctggtaccattgacagcgacggctgggacgcgggtttctcagacatcgcgtcctcagtgcccttgccagtctctgaccgctgctttagccac

SEQ ID NO: 33 - DNA, 1550 bp, Homo sapiens
ggcccgtgttcataactcagtttcctgttttgcacgatgtaaaaaccctgtctttttgcacgatacagccaaaagtattggctgatttcttgctgagtgccctcttagttggtgtgtgaggtcttggtgggctcaggccagctgtttgcgagtgtgggaactcataggttctgtctttgtctcttcctttcacctcattctggtagcagcataaaggttaggcaatcactgggacccgcatggtgttcctccaaagaatagggtaaaggagagctgggagggagccctctccgttgggtgactcttgtgtgccctttagacaggctggcctgccggttccacagggtacagttaggacttgagtctttctttttctgttttgagttggtgagtgagtgatagggtaacatgggccttcaggatgaccccttggaactgtgccgagttccttaaatctcagctgggatcctggacctgggaggcccctgtgagggccagctctggaaaaacctgggagttgatgccggaggctgtggaagaactctgctcgagggcagggtgccctggaacactggtagttctggggctgggagggagaggggctccggctttctctgaaatgaacactgctcttcagcagttcaagtacttgttctcaaaacattttctaattgattggtaggttttcataagcattgtttctttaaggcatggaaagggaagaatgctcaagcaagtcatgtttgttttcagtgggatgggcccgcgttctcactgctgggggcttccccttcatgtggcacctttgtgccaggccaccaggcagactcttcccaccttctcccactgaagcaccaaggggcttgaaccgtaatttggctaatcagaggcattttttttgtcctagtatctttcacacttgtccaaccgtcttatttttttaaaagttctgttgcttgtattaacacgaaactagagagaaatagtttctgaagccagtttattgtgaagatccccaagggggaggttcggtagagaaaaatagtaagctggtttagaaactgacgagggcaaacagccaggacgcattggagaggaatttgccaaagatctaccctgagataacgcctgtccagtgtcttcaccacgtgaataaccagcgctccaaagtgtttttctgctttgaaaaaaaaaaattccacaagcttttaaaggtgcatttaagaatccatgtgactttagaatggaactgccggccctggcaactgtcacgtgtgctagaaggttcgatgcctctggaatgcatgtgatactcatctccattttgtttccttgattgcatttttgttcttttagcagatctgtccctgtgggtggtgtctaagaagtcggacaccttggtttttgtgttagattgagctgggcagctgcaatcagcttctttatatgcaaattaggcacgacccatctgtggttcctggttggtggctaatgaagtgaggggagggagggatgtcaccccaaaagtaggccctcccattggctttggc

SEQ ID NO: 34 - DNA, 29 bp, Homo sapiens
gagtccaactctggacccacccccttcag

SEQ ID NO: 35 - DNA, 29 bp, Homo sapiens
agtacagtgtagccgtgatgtggtcattt

SEQ ID NO: 36 - DNA, 108 bp, Homo sapiens
ccctctcccggcttcagaaagatgctgtggtggctgtgatgccaccggcagagagcatgctggggggtcacacaaagcaggagttggagatctgcaacaggcctggga

SEQ ID NO: 37 - DNA, 105 bp, Homo sapiens
gcaggtgggcttaatgctgatcttcaccaaaacatcttctgtggctcttttcttcccacagtcataggcagtgacggtcagcttatattgatgttctttcccgta

SEQ ID NO: 38 - DNA, 97 bp, Homo sapiens
tctgctaaccttgtccgaagctgacctggttgtttctttgcaaacaatctgatgacctctggggttttaaaggcctggctgatagctgcctgaatag

SEQ ID NO: 39 - DNA, 34 bp, Homo sapiens
atgatcgaagagaaaagcggagcctcagtgataa

SEQ ID NO: 40 - DNA, 83 bp, Homo sapiens
cttctttgcggttgtggttgccgaaatccttaagtcctggctgtgggcgggagctgcagagactctcttacttaggggctttc

SEQ ID NO: 41 - DNA, 280 bp, Homo sapiens
cggaacctccctgagaatcacattgacctcccaggcccagcgctgtggacgcctcaggccagccaccaccgccggcggggcccgggcaagaaggagtggggcccaggcctgcccagccaggcccaggatggggctgtggtcaccgccaccaggcaggcctccaggctgccagaggctgaggggctgctgcctgagcagagtcctgcaggcctgctgcaggacaaggacctgctcctgggactggcattgccctaccccgagaaggagaaccgacctccag

SEQ ID NO: 42 - DNA, 24 bp, Homo sapiens
gaaacaccgcggtaaactctccag

SEQ ID NO: 43 - DNA, 59 bp, Homo sapiens
tgccaaattccaccggaaccgcagggttacacggaggaaagggcgctgtgtggagcccg

SEQ ID NO: 44 - DNA, 102 bp, Homo sapiens
gcctacctggagagcctgccgctgcaggatgccagcccggccgggggcccctcgtcccccagggaccttcctgagccccgggtgtccacggagcacaccaat

SEQ ID NO: 45 - DNA, 36 bp, Homo sapiens
gagtaaacgatggaccgtgcggctggatatttctgc

SEQ ID NO: 46 - DNA, 87 bp, Homo sapiens
ccctggctgaggtacccgaacatgtgctgcgaggacttccggaggaagtgaggcttttcccttctgctgttgacaagacccggattg

SEQ ID NO: 47 - DNA, 179 bp, Homo sapiens
cggcaggcttagagtcaggcatctgctgcttcggtgggggcccaacgcgcatgctgggcgcccgggtgattgagatccaaagagaagggcactgtaagacaggccagatgaactggctcctcgtcatgggactggtacctcagatctgagcatggcccttgtttttggcacgtagcaga

SEQ ID NO: 48 - DNA, 26 bp, Homo sapiens
actttttaacatgcccctgtgaacag

SEQ ID NO: 49 - DNA, 41 bp, Homo sapiens
gtctgcaccggcaggcgcatcatggagcagacgcccaccgg

SEQ ID NO: 50 - DNA, 36 bp, Homo sapiens
gaatctggggtggtggcagtctcccctgagaaaagt

SEQ ID NO: 51 - DNA, 128 bp, Homo sapiens
tcccagcaccctcccgaggaggaagtgcattatcaccttcctgtcgctcgagccacagcccctgtgcagtcagaggtactagtcatgcagtctgagtaccgactgcacccctatactgtgccacggga

SEQ ID NO: 52 - DNA, 80 bp, Homo sapiens
tagccggccgccatgaagtgctccgtatactgctgcatcttgatggactccagccactcggacaccgtgcggaagggcac

SEQ ID NO: 53 - DNA, 52 bp, Homo sapiens
cccgcaggctcagcgtggccaggacgccgctgccgcgtacgtcggggatatc

SEQ ID NO: 54 - DNA, 67 bp, Homo sapiens
ggccagggccacgacacggtagccagcagctgtatagctctgcagcatctgggcgaagtcggtgggc

SEQ ID NO: 55 - DNA, 76 bp, Homo sapiens
tgacctggtagaaggcttgctgggtctcgatccagatatagcgctggccctggaagaggtaataccgcagcacccg

SEQ ID NO: 56 - DNA, 59 bp, Homo sapiens
caggctccgccaagggttgtggccggcaaccggcgcctcaaggagagggcgaccaccgc

SEQ ID NO: 57 - DNA, 70 bp, Homo sapiens
cttgctgtagaccttctcatcacggcagtcctccttgggcaaccagggtgtctctcggtcacagttcacc

SEQ ID NO: 58 - DNA, 24 bp, Homo sapiens
tgcggaacttcctgaaggcacagc

SEQ ID NO: 59 - DNA, 103 bp, Homo sapiens
atttctcggcatcccctatcttcactgacactgtggtgttccgagtggcaccctggatcatgacgcccagcactctgccacccctagaggtgtatgtgtgccg

SEQ ID NO: 60 - DNA, 99 bp, Homo sapiens
acgtgttttgtggatgcggtggcagagctggccaggaaggccggctgcaagctgaccatctgcccacaggccgagaaccgcaacgaccgctggatccag

SEQ ID NO: 61 - DNA, 26 bp, Homo sapiens
gggtcggagcccatctgatgaataca

SEQ ID NO: 62 - DNA, 26 bp, Homo sapiens
tgtacatctctgcccaggtattccca

SEQ ID NO: 63 - DNA, 44 bp, Homo sapiens
gattggcggagactcctgcaacctcatcggctccttccttgctg

SEQ ID NO: 64 - DNA, 29 bp, Homo sapiens
aggaacaccagcacgtggggagatttcat

SEQ ID NO: 65 - DNA, 103 bp, Homo sapiens
gccttctgtgaggccacgcacatccccatggagaagctcaagtggacgtcccccttcacctgccatcgagtgtccctcaccacccgcccgtctgagtccaaga

SEQ ID NO: 66 - DNA, 168 bp, Homo sapiens
gcagcttaatgtggagtggccttccttgggccacagaccagccaggggtgggcagtgcaggaagacctgctgtgggacccctgtgccaccccatggggcagggcagtgcttaggaagtggggccagtcagacagaggcacagttccttcccagctgatattgagcttc

SEQ ID NO: 67 - DNA, 25 bp, Homo sapiens
aacgggtttgaggttgtgaattcat

SEQ ID NO: 68 - DNA, 81 bp, Homo sapiens
gcagtgggagatgccgtgcgccgtgaggttgaggtcatggaagacgatctcctcgccctggatgcgcagctcccggacaca

SEQ ID NO: 69 - DNA, 27 bp, Homo sapiens
cttgcacactggggttacccacgtaac

SEQ ID NO: 70 - DNA, 193 bp, Homo sapiens
cagaccgatgtagcctggcgggcagcggcactcctccacctcgagggcgcggggtctgtttgagggccccggctgggcgacctccaggctgactgcgctgatgctggccgccagcggcacggaggagaacgtggcccggatcaggagctcatccaggtcggccagtgccatcaggaggtgctcgcgtgtggcc

SEQ ID NO: 71 - DNA, 101 bp, Homo sapiens
ggctgctgggcgtaggatgctcggatcaggagggtgtcgatgcctgccagtgccatcagcaggtgctcccgtgtggctggctgcccatcgggccgctgcca

SEQ ID NO: 72 - DNA, 32 bp, Homo sapiens
atgctgccacgctcgtcacagcgcacaatctc

SEQ ID NO: 73 - DNA, 91 bp, Homo sapiens
cgctccggtcaggacagtcgctctcctcgtcacagtggaagctggctgggatgcacatgttggtagagacgcatcggaactgtgtgggccc

SEQ ID NO: 74 - DNA, 36 bp, Homo sapiens
gatgaacaccacactgacaacctggtctccgggaat

SEQ ID NO: 75 - DNA, 27 bp, Homo sapiens
cccgcaggaagcccacggtgttcactc

SEQ ID NO: 76 - DNA, 113 bp, Homo sapiens
gaccccatgcactgtcctgtcacagccgcacttctccagctccccactgctgcacgcccgcgtcactgcaaaggccacacctgccgaagagatggcgtacacgaaggccgcct

SEQ ID NO: 77 - DNA, 195 bp, Homo sapiens
tgatcagattcaacgcggtcctcaccaacccgcagggagattatgacacgagcactggcaagttcacctgcaaagtccccggcctctactactttgtctaccacgcgtcgcatacagccaacctgtgcgtgctgctgtaccgcagcggcgtcaaagtggtcaccttctgtggccacacgtccaaaaccaatcagg

SEQ ID NO: 78 - DNA, 121 bp, Homo sapiens
gccaccgcccatggactgcccgagcgccctgcaccaactcatgctggactgttggcagaaggaccgcaaccaccggcccaagttcggccaaattgtcaacacgctagacaagatgatccgc

SEQ ID NO: 79 - DNA, 30 bp, Homo sapiens
cttctcgatgaaggggaacaggctctgggc

SEQ ID NO: 80 - DNA, 30 bp, Homo sapiens
gtcaccctggcccgatcgcgctccttctcc

SEQ ID NO: 81 - DNA, 114 bp, Homo sapiens
atgacaaccaactctgaggccttggaggggacgctgctgcctaccctgctgatggctctcacccggaaccgatagctctgaccttcgacgaggccttggattgggcaccgacaa

SEQ ID NO: 82 - DNA, 70 bp, Homo sapiens
gacagctcggaggaggccgtcagagccagggctgctgccagggcgtagtccgcggcgctgaactcatgct

SEQ ID NO: 83 - DNA, 59 bp, Homo sapiens
tctgctgtatgtgcggagggagactgaggaggtgtttgacgcgctcatgttgaagaccc

SEQ ID NO: 84 - DNA, 64 bp, Homo sapiens
tcacagatgtacgactcctctttgattgccagtgtgggctacattctgtccacaaccattgcta

SEQ ID NO: 85 - DNA, 121 bp, Homo sapiens
tgctgaagtggcttgtggtgctgagtgagcctcgggggctgggtgtgctcggtgtcacccgcatgcgcagccgttccaggtccccaaagcggtcagggaacggcttggtctggtcctccag

SEQ ID NO: 86 - DNA, 41 bp, Homo sapiens
ccatcccgggcggcgctccggacgccctcccctcaccgcgc

SEQ ID NO: 87 - DNA, 165 bp, Homo sapiens
ttaaagtgctgtacagttaccacaaaaataaaataggaaactagcaccattctacctctcttctctccacacctgggttgtggggagatttgctaatcactgaaaaaaaagggtcaagagtaatcatcccaagcttaggctgatgtgggttaagatcagccagag

SEQ ID NO: 88 - DNA, 48 bp, Homo sapiens
tccaggaaggagtgttagcattttggtgcctggtttgattaaatgtgt

SEQ ID NO: 89 - DNA, 60 bp, Homo sapiens
aagagatcagagaatctatgcggagaaggtcttcttcttccagtgtggttgtagttggca

SEQ ID NO: 90 - DNA, 24 bp, Homo sapiens
ccaggactgaatttcaggctggac

SEQ ID NO: 91 - DNA, 31 bp, Homo sapiens
agggagctcaatcctggtagcaacacccctg

SEQ ID NO: 92 - DNA, 24 bp, Homo sapiens
tggtttttccccatcatcggccac

SEQ ID NO: 93 - DNA, 188 bp, Homo sapiens
gtcagcaggtcatcctgcacctgcccctatcccagaaggggcccttctggacatgggagcctagtgcccctcgaactctgctccaggtcctacaggatccagccctgaaagacctcgtcctcacctgccccaccctgccctggcattccctgatcctgcggccccagtatgagatccaagccatcatg

SEQ ID NO: 94 - DNA, 26 bp, Homo sapiens
gcgagagacgcggccctcggggctcc

SEQ ID NO: 95 - DNA, 103 bp, Homo sapiens
ccttggctggatccccgtggtgcccatagacaagcgcccggacccgggcaggctcggcggatgcggagtaggaggaggcggcaggtccgtgacagccagaagc

SEQ ID NO: 96 - DNA, 73 bp, Homo sapiens
caacgcgggccagaacgcgtcgttccagtgcatggccgcgggcagagcggccgaggccgaacgcttcctcttg

SEQ ID NO: 97 - DNA, 25 bp, Homo sapiens
tctggactggggggcgaggccaggg

SEQ ID NO: 98 - DNA, 140 bp, Homo sapiens
gaggcagaagcctccgtacgccagtggtccttataacagcagtggtggccgtaaaagggggtgctgcaggggtgctgggggtggcggtggccactgtggcaggcactgtggccacagtcgggtcccctgtgcttgtggca

SEQ ID NO: 99 - DNA, 34 bp, Homo sapiens
tgtgcccacaggctggatgttcgtggtgggcagc

SEQ ID NO: 100 - DNA, 100 bp, Homo sapiens
cccgagtagaggtcatccagttcatcatcgggaaaggagtcatcatccccagagccctccaggtccacgggtctctcgaagttctcactgcgccagcgct

SEQ ID NO: 101 - DNA, 133 bp, Homo sapiens
ccacccccaacttaaagctgatctctgtgttcttgaaggtgctgtgtgtttttagggtgagaatgtccccattcttttcgatgattgtggtaggcttggtcatgctggccacctgcctggtagcaaaacccac

SEQ ID NO: 102 - DNA, 104 bp, Homo sapiens
ggcaagccagggctccccgaaggccccggagctccagggtggcctctctctcctgcagggcccggtggcccaacaggccccatggaaccactcttgccaggtcc

SEQ ID NO: 103 - DNA, 25 bp, Homo sapiens
tgggcgcagttgtcgaggcctggca

SEQ ID NO: 104 - DNA, 102 bp, Homo sapiens
caggcacactacggagggtccctgtgcctaccagccacagcggctccttggccctaggacttcctcatctgccatcccccaagcagcgggccaagttcaaga

SEQ ID NO: 105 - DNA, 55 bp, Homo sapiens
ggcgaagatggttacgtccgtatccattacttcgacccacagtacttcgaatttg

SEQ ID NO: 106 - DNA, 58 bp, Homo sapiens
tggggggcgcttggagccgccccgggctcgcgccgcaggggatagtacggcggggtcg

SEQ ID NO: 107 - DNA, 130 bp, Homo sapiens
ggtcacgccctcgctcctgcagatggtgcggctgcgctccgtgggtgctccaggaggggctcccaccccagcactggggccatcggccccccagaaaccactgcgaagggccctgtcagggcgggccagc

SEQ ID NO: 108 - DNA, 337 bp, Homo sapiens
ggcacaaccctcctagaggcgggacggtttcctgccaatcactgctggtttgccctccccctggtgttggcccggctgactcggggtaggggaggtcggggagggggcgataaaatggcgcagggggcggagtgaggcgcagtcgttcgcccaggctttggcccggcttccggaggtgaagagcgggagggacgagggggtcggcgttacccggcttggagggggatgggggcgcctgttgcttctccagggggttgcgcacgccgtccgccccttggagggattgggaggcccacgccctgctgcgagaagggcgcgttctagctcctgaggtgat

SEQ ID NO: 109 - DNA, 24 bp, Homo sapiens
tatctcaggagtgtcattgctcat

SEQ ID NO: 110 - DNA, 26 bp, Homo sapiens
tcagctgggacctcgacccgtttggg

SEQ ID NO: 111 - DNA, 206 bp, Homo sapiens
gtaaaagtgatgttgaagcccctcttccctgtggagtggtcagtctggaactcgagacgggccacgtggccactgcttgtgatggaggagggaagctggtttcctgagaaggtgcccaggacgggcgcctcggcggtggccccatccttgatgaccaggaaatcaaactgaggctccacgtcaatgtcgttgaaggccaggtggat

SEQ ID NO: 112 - DNA, 186 bp, Homo sapiens
agttcctaagcctcaccaaagagcactcgatcctggtcgaagagagttctggggagctggaggtacccggcagctctcccgaggggaccagagagctggctccctgcattcttgcccctcctctagtggcaggcagtaatgagcgccccagagcctccatcattgtcggagacaagcttctgaagc

SEQ ID NO: 113 - DNA, 105 bp, Homo sapiens
aaggcggccgcgaaggccaccgtggcggaggccagccccgagcttgcccagcggtgctccaggcagggaggggccaggcccgccagccaggcgaaggcgcaggca

SEQ ID NO: 114 - DNA, 62 bp, Homo sapiens
tggaggagggcgggcttacaaccacttggccctgagacaggggcaccgccgaagagtttgtt

SEQ ID NO: 115 - DNA, 247 bp, Homo sapiens
cttctgtagttgtatgaaaaaacaaatattgttagcatagtagataaattgttatgaaataccagaaaaaaaaatctgtatcttttactgagaacacccaatacccagataaatgactgtatcaggatttcatttgcatgttagtccacagagttgcccagaaccctaaatttattcataagagaaaatattgattaattattggtcattcctcataagtgtagctgttgatgtgtgcgtctgatta

SEQ ID NO: 116 - DNA, 69 bp, Homo sapiens
gactccgaagacagtcagccaggtttcggcgtgtgaagttagctgctgccgtgggagacaattcatatc

SEQ ID NO: 117 - DNA, 69 bp, Homo sapiens
catctcaagaacacatattctggcctacagcttattatcgtcatcctgccggggaagacaccagtgtat

SEQ ID NO: 118 - DNA, 103 bp, Homo sapiens
agtgcctgaccctgcgggaaagccggcgagacattgatgtggtgaaggaccctgtggaggatgagctgcataaagaggtggaggtcatcgaggccaccaagaa

SEQ ID NO: 119 - DNA, 94 bp, Homo sapiens
aggatctgcgcacaaagctcctgagcctgaagctgtcccatacccggctagaggccagaacctaccggcccaacgtggaactctgccgggacca

SEQ ID NO: 120 - DNA, 161 bp, Homo sapiens
ggcagtcctggcatcccatagccagtggggcctatcagcccaggggggccccgggtccctggctcccctttggcccctgatgggccctgtggtcctggcaaccctgctgcccctgggactcccacaccgtctactccaggaggtccttttgggcccacagc

SEQ ID NO: 121 - DNA, 63 bp, Homo sapiens
gaaggagaagagtgccctagcccgggagcgcagcctcaagaagcgccagtcgctgcccgcctc

SEQ ID NO: 122 - DNA, 53 bp, Homo sapiens
gaacaggcccggacaccggcaacacaaagcgaccgttattattctgaactttg

SEQ ID NO: 123 - DNA, 31 bp, Homo sapiens
atgaggagtgtctgccggatcagctggaact

SEQ ID NO: 124 - DNA, 97 bp, Homo sapiens
ctcccgggatgttctgggcccgcagccgttggtcgaggatgtaaagcatctccccgcccaagttcaagaagagcagcggtagcgtccgcaccgacat

SEQ ID NO: 125 - DNA, 118 bp, Homo sapiens
gcacttgttcatgtcggggttgcgggcgtcgaagtatccaggtgggcaggacggcaagcagacgcccacctggcggatgtcgttcctctccagcaggatgaacagcttgggtgagcac

SEQ ID NO: 126 - DNA, 73 bp, Homo sapiens
ttgtacaagatcttggtgttcgtcttttgaaattcggtcccaggccttgggcaaagcttgtatgtttgccaag

SEQ ID NO: 127 - DNA, 67 bp, Homo sapiens
acgtgcctggcgacttcttcgggtggtccccgtccgccctcctcgtccctacccagtttcttgcttc

SEQ ID NO: 128 - DNA, 25 bp, Homo sapiens
gggtggcgatgcgccgcccccgcca

SEQ ID NO: 129 - DNA, 118 bp, Homo sapiens
gtgctagaagataattctcagcggaccaaatggaaagtgatcagccccacagggaacgaggcaatggtgccgtcagtctgcttcctcatccccccacccaataaggatgccattgaga

SEQ ID NO: 130 - DNA, 47 bp, Homo sapiens
gactctctgagtggtagtagggaggccacgagaggccggagcattac

SEQ ID NO: 131 - DNA, 36 bp, Homo sapiens
agccctgggggacctttcattccgggtggacagttg

SEQ ID NO: 132 - DNA, 59 bp, Homo sapiens
tggaatgtgtggaccgaggctcccgcatggcctcctgttgtcgcttggcaaagaggctc

SEQ ID NO: 133 - DNA, 163 bp, Homo sapiens
cggagaggttcctcgtccgggctgggaagcgggcagaggcctctgccaggcagcccacagagctgctgcggtccagcggcggggtggcagaaggctcggggttggtcggtgcacgcggggactccaagcgggggctccaggactgcgctgcccggcgtccctg

SEQ ID NO: 134 - DNA, 72 bp, Homo sapiens
ggccgctccgtgcgtctccgcccccccgggaaaggtcccaacggtgcctactgcgagcggtcgaggccccga

SEQ ID NO: 135 - DNA, 38 bp, Homo sapiens
tggaccagatcgccgtcaccatcgtcggcggccacctc

SEQ ID NO: 136 - DNA, 24 bp, Homo sapiens
catccttgggcttcgattcactgc

SEQ ID NO: 137 - DNA, 24 bp, Homo sapiens
ggagaagagcccggttgcattttg

SEQ ID NO: 138 - DNA, 54 bp, Homo sapiens
tctctgtctgtgacaagggattcatcggattccgactccgaatccgagagcggg

SEQ ID NO: 139 - DNA, 51 bp, Homo sapiens
cccttggtgctgagtatccagcaagagtgaccggggtgaagaagcaaagac

SEQ ID NO: 140 - DNA, 180 bp, Homo sapiens
gacatctgaacagctgacccctgaggaagaggctgaggagacagaggcctgggccaagcctctgagccaactgtggcagaaccgacctccaaactttgaggctgagaaggaattcaatgagaccatggcccaacaggcccctcactgcgctgtctgtatgatcttccagacttatcatca

SEQ ID NO: 141 - DNA, 25 bp, Homo sapiens
agtcactgagcgaggacacagcctt

SEQ ID NO: 142 - DNA, 38 bp, Homo sapiens
ttctggaaatctgtggccactcgagtgcccaaggagcc

SEQ ID NO: 143 - DNA, 71 bp, Homo sapiens
tgctgcgtggatgtgctgggtgctgagcaagctggagctcaggctctcatacattttggccctgcctgctt

SEQ ID NO: 144 - DNA, 497 bp, Homo sapiens
gagggtctgtccttgtcaaaaggcaggtgctagacagtctagaccagggtttctcaaactcgtacttgacatttggggccagataattctttgttgtggggctgtctggtgtatggtagggtgctcagcagcatccctggcctctgcccactagacatcagaagcactcccccagttgtgacaaccaaaaatatctccagaccttggcaaatgttatctgtgggggaaaattgccctcaattgagaaccactggtctagctagacctgcactgtccagtacagtagccactaaatacatgtggctaaacttaaatttaagttaattaagattaaaagctcagtttctcagtcacattagtcattcaagtgttcagacagccacatgaggggacagtgcagctacaggatatgccatcatggcagaaagttctattggttggacagcgttggtctatactgactcttatttctcagggagatcacagcaacctaaata

SEQ ID NO: 145 - DNA, 56 bp, Homo sapiens
catcatcaaggaccaactgaacgtgtccaacattgaccaggtggccagacacctga

SEQ ID NO: 146 - DNA, 120 bp, Homo sapiens
gagccattactgcccacaatggggatctgcgccttgtccgggtgcagtggctggacctcgaagccgtcctcaggagagggggctatggtgggggcgtagcgccctgtccggtgctccagg

SEQ ID NO: 147 - DNA, 55 bp, Homo sapiens
tggcttcatcatgtgcagcggcaaagagaacccggacagtgatgctgacttggat

SEQ ID NO: 148 - DNA, 96 bp, Homo sapiens
ctgggacagaacaaggctcacaccccgttccgtgagagcaagctgacacaggtgctgagggactccttcattggggagaactctaggacttgcatg

SEQ ID NO: 149 - DNA, 128 bp, Homo sapiens
gactggagcagcaacggggcaaactgatagcgggcgaaatgggcaagattccagcgggcacagggcagggacttgcaggctgccttctgccttgtctcctcctcctggcctagaaggtcccgtgtgga

SEQ ID NO: 150 - DNA, 75 bp, Homo sapiens
atcagctgtccgatccattcatacttggcaaagtctcggcaggaggggttgggtacatacatgtcccgagcctca

SEQ ID NO: 151 - DNA, 38 bp, Homo sapiens
ctctattccgttcgctggttcgccacctcaggggaacg

SEQ ID NO: 152 - DNA, 89 bp, Homo sapiens
atcagaggaattatgtcgacggcggcttactccaaatctaccttctcctctgggtaggtgctctccgtgtttttcgaaggtggcagtag

SEQ ID NO: 153 - DNA, 25 bp, Homo sapiens
gctcgggccccgctagggccctcac

SEQ ID NO: 154 - DNA, 169 bp, Homo sapiens
agcgcttcaagcgcgccgagctgcccgcgcacgcggccgcggcgccagggccgccgctccccttcccctacgcgccctacgcgcccgcgcccggccccgcgctgctggtgccgccgccttctgccggaccgggcccctcgccgcccgcgcgtctgttcagcgtcgacag

SEQ ID NO: 155 - DNA, 192 bp, Homo sapiens
cggctacggctacgggctggctctcccggcctacggcgcacccccgccggggccggccccgcatccgcacccgcacccgcacgccttcgctttcgccgcggcagccgccgccgctccttgccagctgtcggtacccccaggccgcgccgccgcgcctccacccggacctccgacggcctcggtgttcgcagg

SEQ ID NO: 156 - DNA, 38 bp, Homo sapiens
agctggcccttctcagtgggaacaaccctctcttcctc

SEQ ID NO: 157 - DNA, 28 bp, Homo sapiens
tgcgaggcccgcgagctacaggcgcgcg

SEQ ID NO: 158 - DNA, 27 bp, Homo sapiens
ctttgccctcgcgacgccgccacctcc

SEQ ID NO: 159 - DNA, 55 bp, Homo sapiens
ggttcatttcttgcacccgggccacacgccccggaacatcgtccctcctgacgct

SEQ ID NO: 160 - DNA, 100 bp, Homo sapiens
ttccacgcatgagagcccggccgggggcacagggtctgggctgagggctctagcccctcagcaggcaggtggtcggagttgctaaacaccagtcgccagc

SEQ ID NO: 161 - DNA, 43 bp, Homo sapiens
gctcgcagggtgctggcgtagcccggtcgcgtctgcacgcgga

SEQ ID NO: 162 - DNA, 37 bp, Homo sapiens
cttggccaccttcgtggcccgccgagagatcaccaag

SEQ ID NO: 163 - DNA, 122 bp, Homo sapiens
cccagaaatcatgcaaggcatctacatgcagctgagccacatccaggagcctcgggcccgccaggtggccctgctgcccgtctccctcctggctagctccttcatgaccgaggttgtggtgg

SEQ ID NO: 164 - DNA, 29 bp, Homo sapiens
tcagaatgaggctttactccaggccatca

SEQ ID NO: 165 - DNA, 39 bp, Homo sapiens
ccgaggctgctgcggatagtggcgggtcggccccggctc

SEQ ID NO: 166 - DNA, 24 bp, Homo sapiens
cagtggttttgtactgttgttgct

SEQ ID NO: 167 - DNA, 24 bp, Homo sapiens
tagagctgcctacttaactgtctt

SEQ ID NO: 168 - DNA, 133 bp, Homo sapiens
tgcgctgttctcggagtccgacccagggcgactcacgcccactggtgcgacccggacagcctgggactgacccgccggcccaggcgaggctgcagccagagggctgggaagggatcgcgctcgcggcatccag

SEQ ID NO: 169 - DNA, 25 bp, Homo sapiens
ccgggaagagcccgtggatgttctg

SEQ ID NO: 170 - DNA, 46 bp, Homo sapiens
gtccaccaggagccggtgacatacacagctattgaccctggcctgc

SEQ ID NO: 171 - DNA, 298 bp, Homo sapiens
tcttgtggcaagctataccggaaaagcggcatgtcaaaaatactttaggttctacatagatctctttctctcttttgttttgtttgtttgtttgttaaagttcattatttattttaccttttactgacaatgtgaaactcgaagaaaatgttctctttttaaatatacagtcataaactgttcaaggtaaccataacaaactaggtgttatttattaacgtattataaaataatgtttgatccagtatgtgcttgtcttatttaaaattggaatgtgagacatgttgctgtgacctgt

SEQ ID NO: 172 - DNA, 222 bp, Homo sapiens
gcactcaaatcagtcatggaacagccatcagtgcaacacaaagtttgtaaatcttgtcttgacatcactgaatgcttctttgacttccaaagctcttcagtgggcatctgtccaccccaaagacggtcttcccctgaggcatccaccttcggaaggttttgcgctggattttcctcagaaaactcacgtttatgtgggagctggaaggagtttcctgtctca

SEQ ID NO: 173 - DNA, 24 bp, Homo sapiens
catctgttgaatcttcaagtccag

SEQ ID NO: 174 - DNA, 62 bp, Homo sapiens
tgcaggaaaaagacgcctcctcacaaggtttcctgccacacttccaacatttcgccacgcag

SEQ ID NO: 175 - DNA, 24 bp, Homo sapiens
gatccagatgatgacctgtggcgt

SEQ ID NO: 176 - DNA, 250 bp, Homo sapiens
gcgaaccggctggaaagaaacaccgagtcactcgtacagactcttggtcgcagaacttggctttccgctattggtcctccagaaccgcttgaaacaactggccccagctggcgcatcagaccgcagtgaggaatgccgcggggcgggtggcgaaggcagggtctgcccgccagtggattcccgggtgtcccgcgtggagcaggcttgcccagctgggaagcccatcaaacctcagtcttggcccacagtg

SEQ ID NO: 177 - DNA, 25 bp, Homo sapiens
gcaaggtataaaacggagtctggga

SEQ ID NO: 178 - DNA, 28 bp, Homo sapiens
aggcgcgcccgctgctcggtggcaggag

SEQ ID NO: 179 - DNA, 122 bp, Homo sapiens
ggaccagaggacatcaaaattgcaaaatgtgtcaggtgattacagcggcatgaggtgtgggtctcatttgagtatgtcagctcacagccctctgaagaccagctgccattcatggtatcagg

SEQ ID NO: 180 - DNA, 26 bp, Homo sapiens
ttagtccttgttcaccctggtcacct

SEQ ID NO: 181 - DNA, 97 bp, Homo sapiens
agacccatggccttcgactacaaaaacatactaacaaagtcaaattaacatcaaaactgtattaaaatgcattgagtttttgtacaatacagataag

SEQ ID NO: 182 - DNA, 109 bp, Homo sapiens
cctgcccactggtaagcatcttcctctcttactcctctgccttccagagttggctgcaagggaggcctagtggcctggagcagggagaggacgggcagcagtccgggtt

SEQ ID NO: 183 - DNA, 25 bp, Homo sapiens
tgggaggtcaagttaagagtcaaaa

SEQ ID NO: 184 - DNA, 104 bp, Homo sapiens
gcctcgggctctatagagccgagcccgctgggtacccgcccggtaccgcggcgaggccagtgcccctggatcttgcctctgctccgacgccgttggggaccagt

SEQ ID NO: 185 - DNA, 27 bp, Homo sapiens
ggcgcaaacttggggtcgtcctcaggt

SEQ ID NO: 186 - DNA, 24 bp, Homo sapiens
gaggactcgttgaccttcttcact

SEQ ID NO: 187 - DNA, 27 bp, Homo sapiens
gatcaaggacagcgtcaccctcctgcc

SEQ ID NO: 188 - DNA, 139 bp, Homo sapiens
agtaagttctaatcacagtgcagcatacaatggcaccgatggcctggcaccagttgaagtagaggaacttctaagacaagcctcagagagaaactctaaatccccaacagagtatcatgagcctgtatatgccaatccc

SEQ ID NO: 189 - DNA, 39 bp, Homo sapiens
tcatcagatagaacccggaatagctcagcaaattcaagc

SEQ ID NO: 190 - DNA, 25 bp, Homo sapiens
ctttcgaccttgaaagactccctgg

SEQ ID NO: 191 - DNA, 114 bp, Homo sapiens
aagatcccaccggcagctgaacctccagctcaccttgtcaactccccgttatctgctcccctgagcccatcctctacaggcacctgcccccgccttccaggtccaaccctgaga

SEQ ID NO: 192 - DNA, 26 bp, Homo sapiens
tttctcctggcaccctgtattcatgg

SEQ ID NO: 193 - DNA, 126 bp, Homo sapiens
aaggagagggactgaacagattcttgacaagcctaggcataaatgctccaggtttgggaaagaggtaaaataaataggtggttactggggaggctccaacacagccagaagggacactgtttgctt

SEQ ID NO: 194 - DNA, 103 bp, Homo sapiens
ctgtgttcgccctgcagtttccgccttggcaggaggccaggcacaagactgacatatgggctcaaccagtgcctggccttgcctgtgtcacctttgtccagtg

SEQ ID NO: 195 - DNA, 54 bp, Homo sapiens
ttctgtcctggattaccctcactgcgtggtgcatgagctgccagagctgacggc

SEQ ID NO: 196 - DNA, 398 bp, Homo sapiens
gacatcgggcaccagaccctttgaggggtgctcgggataggacaccacccttactatacagagatcgtgatagggacctttatcctgactctgattgggtgccacccccacccccagtccgagaacgcagcactcggactgcagctacttctgtgcctgcttacgagccactggatagcctagatcgcaggcgggatggttggtccttggaccgggacagaggtgatcgagatctgcccagcagcagagaccagcctaggaagcgaaggctgcctgaggagagtggaggacgtcatctggataggtctcctgagagtgaccgcccacgaaaacgtcactgcgctccttctcctgaccgcagtccagaattgagcagtagccgggatcgttacaacagc

SEQ ID NO: 197 - DNA, 106 bp, Homo sapiens
catcaacctcctgtcctttgacttccatgggtcttgggaaaagccccttatcactggccacaacagccctctgagcaaggggtggcaggacagagggccaagctcc

SEQ ID NO: 198 - DNA, 29 bp, Homo sapiens
tctgtgcacgaacaggtggccgactctgg

SEQ ID NO: 199 - DNA, 30 bp, Homo sapiens
cattggaggctggaacttcgggactgcccc

SEQ ID NO: 200 - DNA, 32 bp, Homo sapiens
gccggctcgccgagctggagaactttgcgaag

SEQ ID NO: 201 - DNA, 25 bp, Homo sapiens
ttgccgctatcgcaggcgccaggag

SEQ ID NO: 202 - DNA, 73 bp, Homo sapiens
ctgtacgaccggagtctggagtcaaacccagagcagctgcaggccatgaggcacattgttacgggcaccaccc

SEQ ID NO: 203 - DNA, 31 bp, Homo sapiens
agagaggccgcagtcgatcatagtcttcctg

SEQ ID NO: 204 - DNA, 105 bp, Homo sapiens
ccagaaaggatcctagaccgttgcagctctatcctcctccacggcaaggagcagcccctggatgaggagctgaaagacgcctttcagaacgcctatttggagctg

SEQ ID NO: 205 - DNA, 85 bp, Homo sapiens
gctttcttaagaccggcgtccgcgatggcccgaataaaggaaagagcttctacgtgtgccgggcagacacgtgcagcttcgtgcg

SEQ ID NO: 206 - DNA, 44 bp, Homo sapiens
cagattccccaggcgacggcttcgatgaaggacggcaaatggga

SEQ ID NO: 207 - DNA, 77 bp, Homo sapiens
ctttgcccagtgcaagaagggggtgcgtgtggtgaactgtgcccgtggagggatcgtggacgaaggcgccctgctcc

SEQ ID NO: 208 - DNA, 81 bp, Homo sapiens
gacgccgggcatactttcggcgatgctgctcgtccactcgctccaggtaccaagtacctgggaaaaggctgtttgtgtcac

SEQ ID NO: 209 - DNA, 900 bp, Homo sapiens
actgtgactgggtgttcgctcagcagcatttgaggaagcataactgtgctgtgaagggggtgtggggtacttgcccacagaggctgggaaaggatgataggctgggagaatggtctgagctacctgcccgtcctgctggggcatcatggcagtggggaaagccacactgggcaaacgggccatttctggaatctggtacatggtgggcagggggcccgcaacagctggagggcaggtggactgaggctggggagcccccgctggttgggcaatactgcctttagggatgagctggaaagtcacaatggggggcaagggctcccgaggggtggttatgtgcttcccttcaggtggcctgctctggggagctatgccaggatgggtgccctcagctggagccaggaccataccaaacatctcattgtactgggtctcattcacctccatgcggttcatccaatctgctgggactgggactggatggagcctactcaagcttccagcactgccactgcctggagacacaatgtggtggtgggatagcaactggctcactgagggaagcacagtgctggccccatgtgccaaaggctgcatttcatgaaggttagaaaaagatagtgcatgctgggcatggactggggcaggaggggcggcagtggccaacatagggttgggtgaggcctgtaagatcccaggggatgtaatcattggagaggatgtggtgtcggaaacatacgtgtgaggagattctagggaatcaacaggggataaagttactgaactctcagacagttggaccttctcactcagagacttcttcctcctactacccttggcatcctttgcctccttggcaaggttagggaggctagtaggcatggtactcttggcactggg

SEQ ID NO: 210 - DNA, 24 bp, Homo sapiens
tgcaagatcctccgctgcaatgct

SEQ ID NO: 211 - DNA, 33 bp, Homo sapiens
tggacgcctgggtccgcttcagtgctcagagcc

SEQ ID NO: 212 - DNA, 49 bp, Homo sapiens
cagccagcaaacaacgggtggactccagattccgaaaaatgttagtgga

SEQ ID NO: 213 - DNA, 29 bp, Homo sapiens
ccatggctggccgcgtttgtttgtgccag

SEQ ID NO: 214 - DNA, 79 bp, Homo sapiens
cagaggagatagcaggtcgagggagccaacgagaagagactgccagcagggaaggactgtcccgccaaggacagagctg

SEQ ID NO: 215 - DNA, 24 bp, Homo sapiens
tgatcctcaagtactttcagccag

SEQ ID NO: 216 - DNA, 24 bp, Homo sapiens
atcaggtggtctattattatacag

SEQ ID NO: 217 - DNA, 130 bp, Homo sapiens
gaccgggagtatgctgtgaagacccaccaccacttgtgttgccgccaccctcccagccctactcgggatgagtgctttgcccgtcgggctccttaccccaactatgaccgggacatcttgaccattgaca

SEQ ID NO: 218 - DNA, 72 bp, Homo sapiens
tgaaattctctgccggccggggggtaggagggaatgtgttgccctgggagaatagctgttgggtggcaggga

SEQ ID NO: 219 - DNA, 105 bp, Homo sapiens
ccaaacatgtgcacaaaccggttggtgcaacatggactacaagttcggctacagctattcaagacacagaacaagggctggggtatccgctgcttggatgacatt

SEQ ID NO: 220 - DNA, 29 bp, Homo sapiens
tggcaccgtccctcacccaggagatcctc

SEQ ID NO: 221 - DNA, 90 bp, Homo sapiens
agaggatgttcatgatggcaaggagagggcaagggccgttagtgctctgggtgatgatgggtgtctgttctcctttccaagggatccact

SEQ ID NO: 222 - DNA, 72 bp, Homo sapiens
agtcccgacctctacatgttgtgctgggaaatgaagcctgtgatttggactccacagtgtctgctcttgccc

SEQ ID NO: 223 - DNA, 24 bp, Homo sapiens
acagccagacttcgagcttccaag

SEQ ID NO: 224 - DNA, 162 bp, Homo sapiens
accaagggaattttatcttctgcttctttggtatgctgggaaccggggccccttcctcctttggaaacagtaccatctccctgaccctgggcaagtactgcccccttttcagcctctcccattggccctggcctctctgcccctccagctgagttgccttcc

SEQ ID NO: 225 - DNA, 106 bp, Homo sapiens
gccaccaagccttcgagctttgatgtcagggaagatctctctgatgatcttgccaaagttggctgtgctgagtgggcggcaacaggcaagactctcacagtacttc

SEQ ID NO: 226 - DNA, 103 bp, Homo sapiens
ggacctgaagacccggttggccagctcagaaggcttccagaagcctagtgccagcctctctcagcttgagtcccagaatcagttgttgcaggagcggctacag

SEQ ID NO: 227 - DNA, 130 bp, Homo sapiens
tttgaagcgtcaggtggatgaagcagaagaggaaattgagcgactggacggcctgaggaagaaggcccagcgtgaggtggaggagcagcatgaggtcaatgaacagctccaggcccggatcaagtctctg

SEQ ID NO: 228 - DNA, 34 bp, Homo sapiens
gctgctccagtcagccgtcgagtgcgccgcctcg

SEQ ID NO: 229 - DNA, 423 bp, Homo sapiens
cacacagcgccttgggtgagtgctgctccactcctgccttcctgactcagtgcttgccccagtctgggcctgtcctcccggtactgtctctcctgcctcagggttgctcacttgcatccatctttgaccactgcctggctgcgtctgggtctgtccctgttctctagcccctccgtggcttacagtttggcttctgtcctgctccacagtctcggtgtgtgaccctgcctgtatctgagtgtgtcctcctgtcacagcctggctggtctggctcctgccttgaccgtggatctcagtccctctgttctggccattggtggactcctgtgtctgggtgctggtgcttcctgtctggtggctgctgtcctgctccacggtctgggtgggtgtctgggtgtgtgtccctgcctgtatctgagcatg

SEQ ID NO: 230 - DNA, 44 bp, Homo sapiens
cccaggtgggatgaaacaagtggctgttaagtggtgtgaggagt

SEQ ID NO: 231 - DNA, 132 bp, Homo sapiens
ttggagaccaagcctgaagtctcaccccttaacatggagtctgagcccaactcaccgcaaactcaggacaagggctgtcaaacccagcagcagccccatagcccacaaaatgagtccaggccaagcaaatga

SEQ ID NO: 232 - DNA, 36 bp, Homo sapiens
aaagcctgcccaggagacaaggttcgggccacatca

SEQ ID NO: 233 - DNA, 27 bp, Homo sapiens
tttgaaccagacgtctgcacccttttt

SEQ ID NO: 234 - DNA, 151 bp, Homo sapiens
tgcccccggaacagggcgctgctccatggctctgcttgtggtagtctgtggctatgtctcccagcaaggacagaaactcagaaaaatcaatcttcttatcctcattcttgtcctttttctcaaagacatcggcgaggtaatttgtgccctt

SEQ ID NO: 235 - DNA, 78 bp, Homo sapiens
aaacatggccgtacagtaacctgctatacattctttcagacacacacactccagcgtttgtcccttatcactcattaa

SEQ ID NO: 236 - DNA, 66 bp, Homo sapiens
tgcactaggatgcggggtctctgtggggaagggaagggaacgttgtgaatgaagtgggagatgtgc

SEQ ID NO: 237 - DNA, 58 bp, Homo sapiens
gagctgtatgggtatgggggtaaccgctggtcagtggacagtttactggtatccaggg

SEQ ID NO: 238 - DNA, 123 bp, Homo sapiens
ctcaggaagatttactatagctaagagaaaactgcagcagaaagggcgcggctacctacttcttaaattccgtttgtggaccctcagactcttagtcccctactcccagatacagcggcccta

SEQ ID NO: 239 - DNA, 49 bp, Homo sapiens
cactgtgtcatccacgacgcctggagcggcctgaggcacgtggtgcagc

SEQ ID NO: 240 - DNA, 95 bp, Homo sapiens
ctggggtctgacaatacctcgagccacaaccgaccagatgccagggacccacggagcccttatgacatcagcaatacagactacttcttccccag

SEQ ID NO: 241 - DNA, 31 bp, Homo sapiens
cagcgacgacttctggaccatcccacccctg

SEQ ID NO: 242 - DNA, 172 bp, Homo sapiens
acaggtttgactagcgaactgggcatattctaacagcccgctgatggggttcttcagctggcactctgtcagtttcttgtagggtgaacaccgtggcaagccatgactgtagaaggagggcatctccatgatggctcgaaactcacctggtgctgcgcggatactattcaag

SEQ ID NO: 243 - DNA, 141 bp, Homo sapiens
tgtctatagacatccccctgcctttccatgtcaattagcacagcatttatatctcgggccttggtaaggccaatatttttagccaaattcagggcagaggagtcagacacattgaagagatagtcgcagattttctccttg

SEQ ID NO: 244 - DNA, 136 bp, Homo sapiens
cctcacggatgtagacagactggatctccttggtcttgaggcagagatcgcaggcccagacggcagaagcttcagtggtcagcagcccataggcgctctcagtcatgcctgtgcactcacggtggaaccatttctg

SEQ ID NO: 245 - DNA, 112 bp, Homo sapiens
cttagcctggttggacctctgtggcccaggagtcacagaagtcctggggagggagagggacaagtggcttccgctccccagctcagacccagacagtttcaggccccatccc

SEQ ID NO: 246 - DNA, 56 bp, Homo sapiens
agtgggggctcctttagtggcggaggatgtctcaggtggtctgtggggctcagggc

SEQ ID NO: 247 - DNA, 29 bp, Homo sapiens
cctccgcgcgctgttccgcacttgctgcc

SEQ ID NO: 248 - DNA, 34 bp, Homo sapiens
accgcctccgacagtgtcctcgctctacctctga

SEQ ID NO: 249 - DNA, 173 bp, Homo sapiens
gcggtaccgccagagtgtgagtgtgggaggtgccatcctgtgccagttgtgcaagcccccaccactagaggccaccaagggctgcacagagtgccgcgccaccttctgcaatgagtgcttcaagctcttccacccctggggcacccagaaggcccagcatgagcccaccctgc

SEQ ID NO: 250 - DNA, 74 bp, Homo sapiens
cataggatggtaggtatcccgggctggaaagatgtccagctgcccgtagttctttcggcggcactgacagacag

SEQ ID NO: 251 - DNA, 45 bp, Homo sapiens
cagctaccatctgccgagactcgcccacagtcagcaggtcaatta

SEQ ID NO: 252 - DNA, 32 bp, Homo sapiens
taaccggtgccagaaaggcaagcaatcaagca

SEQ ID NO: 253 - DNA, 97 bp, Homo sapiens
ggagaggccggtgcacaggaaggagttgagtgcggcggcaggcacaaagaactggtgcaggtggccgtgcagccaggaggccggcatggagtaggcg

SEQ ID NO: 254 - DNA, 178 bp, Homo sapiens
accctgaccctgctactcggtgcaggccactccaggccttgcttctctaacagcccctgtggctggctccagagctgcctggtccccataaagggggctgaaaggaggatgggtgatccttgaggaggggaagggtctgcagagaatcactcagacaccaggtattacccagctcttc

SEQ ID NO: 255 - DNA, 80 bp, Homo sapiens
gagcaggggccgatccgtgtcaaagttaaagcgtctgtgggcagctcggagcgggggcaggttacgaagagccatgtcct

SEQ ID NO: 256 - DNA, 155 bp, Homo sapiens
taatttatggactggtactctgagtacttcttgtggtgcagcagcagaaccaagccgccccctagcagcatgagccctggggcacccagggccactgccatgatgcccaggactagtggggacaagccgtccactggagggaagcccacacccag

SEQ ID NO: 257 - DNA, 129 bp, Homo sapiens
cctcccgggtcaggtgagaggtgttgagggggcagccaggaggttgctcccagatcccctggaaggtctgcagatggaagtagtaggcagtgccatccttcatgtcatgttgaacccagaaagctgtgt

SEQ ID NO: 258 - DNA, 25 bp, Homo sapiens
tgagttaggtagtggtcatagatgt

SEQ ID NO: 259 - DNA, 39 bp, Homo sapiens
ccaaggctcaactgccctctctatcctactccttttctt

SEQ ID NO: 260 - DNA, 104 bp, Homo sapiens
attcttctgacaggtcagagtcacggccacactcctcttctccctcctccccctcctccttttctgagggtggggcctcaaggccctcggaagccaggacagca

SEQ ID NO: 261 - DNA, 72 bp, Homo sapiens
acttctggagatctcagtggctcttgattctccttttccagagctgtcaatgactctaagttctcttgcaga

SEQ ID NO: 262 - DNA, 30 bp, Homo sapiens
ggcccaggagaaccgtgtggtggccttctt

SEQ ID NO: 263 - DNA, 25 bp, Homo sapiens
tgcctccttgggacgtttaggagag

SEQ ID NO: 264 - DNA, 161 bp, Homo sapiens
aactcaatgcattcccgtgggctggccagctcattcaccgtcttcagggccacgggtgtggactcctctccagcctcaagtcctcgtgccagcccctcatataccatcccaaaagagccctggcccagttcccggattatcgagatctgctcccgaggcac

SEQ ID NO: 265 - DNA, 46 bp, Homo sapiens
tgcagtgtcatgggcaagggcccctggcccacatgcccaatgccag

SEQ ID NO: 266 - DNA, 71 bp, Homo sapiens
cttctggcgcggtgaccaaaaagggagagcgcgcggccaaagagaagccagcgaccgttctgcctcccgtg

SEQ ID NO: 267 - DNA, 94 bp, Homo sapiens
cagtagagcagcagtgcccccgcagcaaggcctgctatgctgagcaggcccccggcgactcctgtggcaaaagggccacttctgttcgcggtca

SEQ ID NO: 268 - DNA, 96 bp, Homo sapiens
agacgtatcagtgcaagccaaactcagcacaggagggaagtcacaaaagacgtgctgaatgcgattggggccacagaatgggaggcgtgaaatcaa

SEQ ID NO: 269 - DNA, 46 bp, Homo sapiens
aggaacccagaaacgggatggttgtcggcaaaggttgggagtggct

SEQ ID NO: 270 - DNA, 26 bp, Homo sapiens
cggagctctccccctcaactgagaac

SEQ ID NO: 271 - DNA, 26 bp, Homo sapiens
ccgcaccgctcggctccactctcgcc

SEQ ID NO: 272 - DNA, 79 bp, Homo sapiens
ggtgatggcgtctctgtctcaggtgatgcataaggaaccacagcatgtgactatcaaacaggtcagtttggtgcaagct

SEQ ID NO: 273 - DNA, 179 bp, Homo sapiens
tctgtgaaggtgtctgagaacttctcctgtaacatcactctaatgtgctccgtgaagggggcagagaaaagtgttctgtacagctggaccccaagggaaccccatgcttctgagtccaatggaggctccattcttaccgtctcccgaacaccatgtgacccagacctgccatacatctg

SEQ ID NO: 274 - DNA, 62 bp, Homo sapiens
gccagagtccggtagcacctgagtaaggcaaatgcagatgataggcggtgagccgaccaggc

SEQ ID NO: 275 - DNA, 50 bp, Homo sapiens
aagacgactccgggatccagacccttctgcaccttcagatgggagctcca

SEQ ID NO: 276 - DNA, 40 bp, Homo sapiens
ccaagagaacaggggcatagacagccgtctggactgggct

SEQ ID NO: 277 - DNA, 29 bp, Homo sapiens
aacattaatgacctcaaactcacgttgtc

SEQ ID NO: 278 - DNA, 25 bp, Homo sapiens
tttgtccagggaatcacgccactgc

SEQ ID NO: 279 - DNA, 167 bp, Homo sapiens
catagctatgtcaatgtccagggaagcatttttaaatagtaaatcagaaacatgtaaactagtgaatacaattttctatttttcattcagaaatttgttgtcatagatgcagcctttatctggaaatcagtgggcagctctggtcaagcacagcatggcgaccactg

SEQ ID NO: 280 - DNA, 155 bp, Homo sapiens
ccattggtcacttaagagcactaacccctccctggtttgaagatgttcttgactttaaatacaaacatctgatattccagcttagactcctccacaagaactagagtgtcatcctattttggcttccagctcagtccctctgctacaagtcttga

SEQ ID NO: 281 - DNA, 47 bp, Homo sapiens
tggggaaagggacatctgaccaaagtttggggaaagatctgtctcac

SEQ ID NO: 282 - DNA, 116 bp, Homo sapiens
ggtcatcacgtttcacctcatcaggattttcacaaaacttgttgatgttgtcctcaaggtaccagcttttgttctcatcaaacacagcaaacacagcctgctgttcgatgtctgct

SEQ ID NO: 283 - DNA, 108 bp, Homo sapiens
gctcaggtcggtagctccaactgatgccctgagcagccacgtagaactgccttagctgtgccgcttctgtcccttggctcccccagcctacccagctggtgcccaaga

SEQ ID NO: 284 - DNA, 156 bp, Homo sapiens
agcccgggaatcttaaggccgccgccggggttggagggtctgcgacgcccaaaagggcagcgcccgcccgcagagtggggctgggaggggacggggtagggtagggtgaccccagggtgcgccttcactcttctggcaccccatttggctttttgg

SEQ ID NO: 285 - DNA, 37 bp, Homo sapiens
taggagatgaattggggatttgctagtaaaatgatac

SEQ ID NO: 286 - DNA, 103 bp, Homo sapiens
caccgtctgtcttgtggtcagtcaccctacaccgagacaacaacgtgggagcggaagtattgcatcctcacagacagccagttggtattgctcaacaaggaga

SEQ ID NO: 287 - DNA, 42 bp, Homo sapiens
tgatgaatgaccctccaacagccccacatgggttgtttctgt

SEQ ID NO: 288 - DNA, 58 bp, Homo sapiens
aatcgtaaaactgttagtatcaggagagcccttcgagtattctctccgctccacaccg

SEQ ID NO: 289 - DNA, 198 bp, Homo sapiens
gtgtggcagtccatccatctgtcagcagccactgcgggcctacttgctgggtgcccagcaccgcactcaccactgcaggcgtggccaggagcgtgagatccccagagcccatggccagtgagaggcggccagggataggtacccagggtatgccacaggagtttgctgggctcacggagctctttcactggtcagaga

SEQ ID NO: 290 - DNA, 107 bp, Homo sapiens
gcgcgtcaccagagtcgtttctcttcggagtcttaggtgatcgagggtgtgcccagggggcggacttgtttgcgcctcccgttccctcccaatttccaaacgtgtca

SEQ ID NO: 291 - DNA, 59 bp, Homo sapiens
gcgccagcagcagattgagcgtgagctgaatggctaccgtgcctggatagacaaagcag

SEQ ID NO: 292 - DNA, 99 bp, Homo sapiens
acatgggccgggtcatcagccagagcgagcctgacctctcctgcatcacggccaacacggacaaggccaccaccgagagcaccagcgtcaccgtcgcca

SEQ ID NO: 293 - DNA, 28 bp, Homo sapiens
ggaggccgcagtactgctcacacgctcc

SEQ ID NO: 294 - DNA, 250 bp, Homo sapiens
caatcaaccactaggagggagatcctgagccacatgcagaaagtggctctgttcaaactccagagctattggcttcccaacttttacacccacaccaagatgaccatggccaaggaggaagcatgccatggtctgatgcaagagtacgagactcgcttatacagcgtttgctacacccacataggagggctccctctgaacatgagcatcaagaagtgccaccactttcagaaacggtactcaagcagga

SEQ ID NO: 295 - DNA, 286 bp, Homo sapiens
gcactcgggcacgcgctcggaagtcgggggtcggcgcggagtgcaggctgctcccggggtaggtgagggaagcgcggaggcggcgcgcgggggcagtggtcggcgagcagcgcggtcctcgctaggggcgcccacccgtcagtctctccggcgcgagccgccgccaccgcccgcgccggagtcaggcccctgggcccccaggctcaagcagcgaagcggcctccgggggacgccgctaggcgagaggaacgcgccggtgcccttgccttcgccgtgacccagcgtg

SEQ ID NO: 296 - DNA, 102 bp, Homo sapiens
cctggcccagcagttgacaagggaggccactcaagcggaaattgaagcagataggtcttatcagcacagtctccgcctcctggattcagtgtctcggcttca

SEQ ID NO: 297 - DNA, 73 bp, Homo sapiens
cgccagcacccgcggtgccgcggggccgctccgaggagcctgagagacccacggaggcttcgcgggaagacgc

SEQ ID NO: 298 - DNA, 51 bp, Homo sapiens
ggctttggaactaggaggagctgggatgtcggactgcggagagctttcctc

SEQ ID NO: 299 - DNA, 296 bp, Homo sapiens
aaagatgctatcgaacatgcgcacatcccccaacagtctgcctcctgcgattgcttttcacagtatccaaagtgtccatctgtctgcttgtcttcgagttaccctccttgttcatatgggtcctagtcttctgaaattttccctttctttcattttctctctttcgttaaacaaaagagctgtagttgcccgttctgcttgtagcactgttgactcttcccgacagttgatgcattgaagctttttacatctgctattttcctggctggacaatgcagtgctgtgttctcgtctca

SEQ ID NO: 300 - DNA, 85 bp, Homo sapiens
tataaaaccagctaatgtgttcattacagccactggggtggtaaaacttggagatcttgggcttggccggtttttcagctcaaaa

SEQ ID NO: 301 - DNA, 85 bp, Homo sapiens
atgggcacggccttctctttcagctgcagctcagccaggggacgtggtcgggggctcagcgggatctcaggctcatcttcctcgt

SEQ ID NO: 302 - DNA, 86 bp, Homo sapiens
ttgccacagacgaaaaggatgatgaagtaaatgcacacaagcatgccagggtaggacggcccgccgtaggccatgatcccattgta

SEQ ID NO: 303 - DNA, 24 bp, Homo sapiens
agaaggatcccagcaaaatgaggg

SEQ ID NO: 304 - DNA, 28 bp, Homo sapiens
caatgcccccgccttggggactaggctg

SEQ ID NO: 305 - DNA, 225 bp, Homo sapiens
cacagtgaaggctccgtgctaccgggagcccgacctgagccagaagccccggttcctggtgggcctgcggtcccacctgctgccccagggctgcgagtgctgcatgagctgtgccgtgcagggctcgccccggccccacgtcacctggttcaagaatgaccgcagcctggaaggaaaccccgcggtgtacagcactgacctgctgggcgtgtgctccctcaccat

SEQ ID NO: 306 - DNA, 220 bp, Homo sapiens
ccgactcagtctccggcgaggtgggatttccagttccttcttggagactaggggtttctgtgtggcctgcacagggctcaagctgttcctcccctcctctgcctccagcctctcctggatgggggcctgtgcagcctccaccacctgccgcctctgcctccgctcctgccgtgttctgaggatgctctggatgtcctcgtcctcatctttggaggctggg

SEQ ID NO: 307 - DNA, 1145 bp, Homo sapiens
attcccatcgtgagtgagcccaggtgaggacatagtcggctcccgtttgttgtaggcccttcccaggtgccttctcagctccctcatctgtaaaccgaggaggtggataagatgctcccggccgggcgcggtggctcacgcctgtaatcccagcactttgggaggccgaggcgggcagattattgcctgagctcaggagttcgaaaccaccctgggcaacatggtgaaacccccgtctctactaaaatacaaaaaaattagccaggcatagtggcgcgcgcctataatcccagctactgggaggctgaggcgggagaatcgcttgagccggggaggcggaggttgcagtgaggcgagattgtgccactgcactccagcttgggcgacagagtgagactccgtctcaaaaaagaaaaaaaaaagatgctcctctgaggtccctccggcgctcatgttccgagtctgcagctccacactttaaatcatactcgaatgcaggacaagtcctaaatatttgccccttcccttgcagtaatttattttctgtatggactgtccctcccccagaggcttccccaccctccattgcctggcccaggtgagcagcttggcaggtctccaagtggaacccggtccagacagggctgcctcgacttcacctttccccctaacttcctccaagggatgctgccccttctcagccccctgcgtgtgtatattggtgggaggcatagaggatggatgttctagaaatgagtaagacacagtgcccacccccaagttaggatgaaaaaagttccagaggtttttaagaaattggattaagctgggtccctaacttcaagaaattcccattatgctccttctcacctttcttttttgctaattatggaaaatagggcccatttcatcatagcctccttcccccgtgctccactacaatcgccgcattctttctagctgcagctggtttcttcaaggctcctgcttaaagtccacacgttattatggccgaaagcaacctggtgcttcggcctggataagagccccttctgcatcttattcacagcttgcagcctcagcccctttgatgaggccctcaggggagaggtcattaccttgatcctgcaaacccagactcgttg

SEQ ID NO: 308 - DNA, 94 bp, Homo sapiens
aggagggcacccaaacattggacgaaccagtgtcaaagacgactttgaaggtctggggtggggtgccgatgccaatctcgccatagtactgggt

SEQ ID NO: 309 - DNA, 1402 bp, Homo sapiens
gaagatcggtggaatcctcccaggctgtaatccctcagaaacatgagaatatcctaagcacctacaacagtgcctggtacataaaaggtgctcgataaatatttgttgagtaaattgtcatctttacttgcatatgaaccagtaactgtcccagccatgaaggagtgcagaggaattagtaggtgttcttgggaccgctggaagtcaggctgaagcctctgagcggcaactctagcagagagaaggccgaggggccacggtgtcttcagtttccctccttcctcctctctggctacattcgtctccaggtgggtggagctgaggaggaatgcgtttgcttttctctgtcttccccgctgccctcccggggcaggtggatcatgagagcgcctagcctcagccagtcctcgtctgggatgcctgggatagggggataggcctcccagattaaggcctcatcccccctcctcaaggcgtactctcagctggcccactgcacattccagggggaacagggcaagaaatatcatggaactgggtaggtaaggccccaaggctgaccacaccctacataagacaagtccttctctctgccccttaccccaggatggcgaggcagacaccaggcacagacctactaacagccatctcccaggcagtcgctactcaacccccttcacccagatccccacaccaagcatctccactgaggctgcatgtgctccactggtgggtcctcctagggatgaggtgggaggagcagaggagacagtctggcactgcactgggcactaacctaaggctccaccgggggaaaccaatctgatatcccctttccatctccctccttcctgcttgacttgccaatgtgtcctgctgcttccccctccttccactctgaggatctctctctctctctctctctctctctctttctgtctctctctctctgctacccttcccaacctgccctcagacactgcacagacctgctgttctctagccacagccagcactgttccctctgggagccaatggcctctccccatctctcatcaccttgtctttggctcaagcagggtggtcagtctccaccggaccccagcgagcacccataagcaaagcactgggtttgtgtcaaagccctgggtccagctgaggcagtagggtggggctgacgaggatagggatgatgacaagtgctgtccttggtgtcaggctggctccagaggcagtgtccatctcctcttcacctctagtcctcacataagatagccacaggtgtgttctccaccacggcatgtcccccatcagggaatgttccactggagtcaccacaaccccagccagggcaaggctgaggctccctgtgacttggacattaatgaggatggtgctcccc

SEQ ID NO: 310 - DNA, 105 bp, Homo sapiens
ctgcctctacctcttgcctggtgggcacaaggctgatgtctctgggggtgtccaggggcaatgtctggtgggggtctttcttgctttgttcatagtttgccttgg

SEQ ID NO: 311 - DNA, 205 bp, Homo sapiens
tgaatgccacctcggcctttggccccaacctgcgctacattgtcaagtggaggcggagagagactcgagaggcctggaacaacgtcacagtgtggggctctcgctacgtggtggggcagaccccagtctacgtgccctatgagatccgagtccaggctgaaaatgacttcgggaagggccctgagccagagtccgtcatcggtta

SEQ ID NO: 312 - DNA, 29 bp, Homo sapiens
gcgggggagagatccttatcccctgccag

SEQ ID NO: 313 - DNA, 48 bp, Homo sapiens
tgaaccaggttgttcagcccttaatgagcagacactctgcatgtagag

SEQ ID NO: 314 - DNA, 65 bp, Homo sapiens
ttgcctgggcaaagaggactgcgtcatgtatgctgggaaagacgtgcttgcattctagactccca

SEQ ID NO: 315 - DNA, 57 bp, Homo sapiens
aggaaccacctgcgcctggttggctgttctgtggctgcctgtaacacagaagcccag

SEQ ID NO: 316 - DNA, 26 bp, Homo sapiens
cagcagggggcatcaccagtccaggc

SEQ ID NO: 317 - DNA, 149 bp, Homo sapiens
cctagatcggggtatatgttaagggattacgaaaatctaggactttttgtggggctttttattaaagggggggagcccgggagcaataccttggaaagaagccctgttgcttagagcggataaccaacggctgaactcttggggtttgc

SEQ ID NO: 318 - DNA, 41 bp, Homo sapiens
cccgagcgccgcaccactcaggccgacttctcctgtgcaat

SEQ ID NO: 319 - DNA, 24 bp, Homo sapiens
tggtatgcggtggtgtgatcgtag

SEQ ID NO: 320 - DNA, 24 bp, Homo sapiens
ctggcgctttcctgggttgcttct

SEQ ID NO: 321 - DNA, 24 bp, Homo sapiens
agtaatttgtgttgtcccgtacag

SEQ ID NO: 322 - DNA, 49 bp, Homo sapiens
acagattctttgccattgaatttgactcggatccttggctcctgaatga

SEQ ID NO: 323 - DNA, 24 bp, Homo sapiens
ggacatctatgagagcaccaccca

SEQ ID NO: 324 - DNA, 52 bp, Homo sapiens
ggctttgcccgtgtggagtccaaagtccttccctaacgaagtggagcctgag

SEQ ID NO: 325 - DNA, 135 bp, Homo sapiens
tactggggaagaaccgatcggccaacggcagcgccaagagcccggcaggcggcggcggcagcggcgcctcgtccaccaacggcgggctgcactactcagagcccgagagcggctgcagcagcgacgacgagcacg

SEQ ID NO: 326 - DNA, 30 bp, Homo sapiens
catccagttcctgttcgccatagccggcat

SEQ ID NO: 327 - DNA, 51 bp, Homo sapiens
tgctcttcaattcggtgctccgccagccccagcttggcgtcctgagaaatg

SEQ ID NO: 328 - DNA, 106 bp, Homo sapiens
gcgcgcactgcacagctctcttctctcgccgccgcccgagcgcacccttcagcccgcgcgccggccgtgagtcctcggtgctcgcccgccggccagacaaacagcc

SEQ ID NO: 329 - DNA, 73 bp, Homo sapiens
tgctcctgttgtacgtcctcgactccaatcactatatactgaacctccttcatgcgaggctatcactcgatac

SEQ ID NO: 330 - DNA, 81 bp, Homo sapiens
cgccggggccgcttgttgcaccgccccgcggcctgcgggagccgctcgccccggccttgtgctcgcgtccgcacccctttc

SEQ ID NO: 331 - DNA, 40 bp, Homo sapiens
ccggacgccattgccgacggtgaacgagcgggacacggaa

SEQ ID NO: 332 - DNA, 121 bp, Homo sapiens
tgctgctcccgagcttttccaaggaaagaagtatgatgggcctgaagtggatgtgtggagtctgggcgtcattctctatacattagtcagtggctccttgcctttcgatggccagaattta

SEQ ID NO: 333 - DNA, 48 bp, Homo sapiens
ggaggtctcaggccccttgggcagacgctgcgcgtgcccagagggagg

SEQ ID NO: 334 - DNA, 128 bp, Homo sapiens
ctgtattttcatcggcccctctgaagcctgaatgaccaaggaaccatccggcagggctggcttcaccagcaattcaggccttgagggcatccgaggcatagtagacgactggatatagggacctactg

SEQ ID NO: 335 - DNA, 172 bp, Homo sapiens
gctggatgccagcgggacctcagacctggactgcagcatctctttggttatcggttgtgtgtgtgctcagaagggaggaggccttccccttgttacatctctctctccatatattctcccggactcatcagtttggggggcgaaaagtccaccacatggtcttggcgacaaa

SEQ ID NO: 336 - DNA, 24 bp, Homo sapiens
gcagacggaagatggcagtcagcc

SEQ ID NO: 337 - DNA, 78 bp, Homo sapiens
atgggtgcccgtggcgtacactgtagcgccttcctgcactaccacaggtgtgttggtcatgcagcgaatcactttggg

SEQ ID NO: 338 - DNA, 115 bp, Homo sapiens
cgcgaccggatccaggtggcgagggcggtggcagcggtggcggcagcagcggggcgccctccgccccaggccgctcctccgggtccgggctgagcgtgaggccgtcgacggacac

SEQ ID NO: 339 - DNA, 88 bp, Homo sapiens
tcgggtgcctcatcgcaggtacagcgctccatgcggcccgcgctgcacgccttggccagtgcgtgcgtcaggccagccgaggagatgg

SEQ ID NO: 340 - DNA, 85 bp, Homo sapiens
tgctttccgtctgatcctccgcccgcggcttcctcctggccgaggctgccgaggtcccgggcccgccgctctctacgcggtgatg

SEQ ID NO: 341 - DNA, 149 bp, Homo sapiens
tggcagctggactcgtgacggtctgcggttccagcaggggcccacgtgccacctggctgtgcggggccccatgcacaccctcacactctcggggctgcggccagaggatagtggccttatggtcttcaaggccgaaggagtgcacacgt

SEQ ID NO: 342 - DNA, 93 bp, Homo sapiens
cagacagaactgcgcgctgctggagcaggcctatgccgtggtgtctgccctgccacagcgcgctgagaacaagctgcacgtgtccctcatgga

SEQ ID NO: 343 - DNA, 392 bp, Homo sapiens
ggacccatcgcttacactgtagaaggacacttccccggcttcgaagtccaggaagatgcccatgtggctgggaggctccatcagcatgaccggggttagggcagagaaggtggataagtacttggtccccttggacagctgcaccacccagaagccgttttcggggcacttggggaccctgtctttccggctcacgttgtccctgcacacacccagggcccacaacgcgtccccggtgatgttcatgcccacctcccagtagtgcctcccagaggagaaggccgtctggcccacagcacaggggtaagccacaaatcggtccttgctgcagaacccactgccctccggcgaagagccgaggtagcgcctctggcggctctcatacaggagga

SEQ ID NO: 344 - DNA, 106 bp, Homo sapiens
tgagctcgtggaagaagcgaaggaggagaagaagaagggaggggaaggcggaggagggcaggggcgcgcagagccacggtttgctccaggcgcgtcggaaccgcag

SEQ ID NO: 345 - DNA, 154 bp, Homo sapiens
ttcgccgagaactgtgggcctactgtggcagtgagcagctggacgtcgcagacctgcgcaggctgcggtacaagggcatccgcccggctcctggctaccccagccagcccgaccacaccgagaagctcaccatgtggagactcgcagacatcga

SEQ ID NO: 346 - DNA, 24 bp, Homo sapiens
ttgtcaggcataggatttcactat

SEQ ID NO: 347 - DNA, 163 bp, Homo sapiens
cagcaggctaaggagatacccattcaagaactgacatgattaaaaattaagatataaatgggtgactcacaatttcattagcttacaaagatggtggagttaactactacaagcacactagttatacagtattttgtgggagaagggcatacagacatggcta

SEQ ID NO: 348 - DNA, 119 bp, Homo sapiens
gcgaccgagcagaggcctttccacctggtggtgttcggcgcgtctggcttcaccggccagttcgtgaccgaggaggtggcccgggagcaggtggacccggagcggagctcccgcctgcc

SEQ ID NO: 349 - DNA, 25 bp, Homo sapiens
ttgcccaggttgtttcacattgttt

SEQ ID NO: 350 - DNA, 97 bp, Homo sapiens
acctcacgtcacactgctgctgggatctttccacacttctgacctccagccagagcctgcgaaagctgagcctgggcaacaatgacctgggcgacct

SEQ ID NO: 351 - DNA, 215 bp, Homo sapiens
gggtagtaggctgatttcatctagataattccggtcaaccaccccagccaacactgtaactcccttcttagcctgttgacttaagaataggaggagaacaaagtgtccagggggcaatcttaacttccagtttaatggaatttttgttgggtctcctggtggcagtgctcctccctctggaactaagacctctaggccagcagaagataatgttg

SEQ ID NO: 352 - DNA, 130 bp, Homo sapiens
tgtaaagctggatcccgccacggcgcacccgagtctgctcttgaccgccgacctgcgcagtgtgcaggatggagaaccatggagggatgtccccaacaaccctgagcgatttgacacatggccctgcatc

SEQ ID NO: 353 - DNA, 25 bp, Homo sapiens
ggcctcattttgctggtgttttagg

SEQ ID NO: 354 - DNA, 42 bp, Homo sapiens
cacaagaggaggacatcccatgcggctactcctgcccagcgt

SEQ ID NO: 355 - DNA, 57 bp, Homo sapiens
atgagaagcataattgccggtgatatgtccagaaccatcacagccaggcgtggggca

SEQ ID NO: 356 - DNA, 80 bp, Homo sapiens
ttctggagggaccctatctttgtgcgggcatccggacaggctgcggtgatgtgggtacagcccagttacgtggccggttc

SEQ ID NO: 357 - DNA, 118 bp, Homo sapiens
ccagggtcttcacgggttcggtgacatttcgggtgtcccagaacttcaccttacagtcgtctccgcagctggccaagtagtactgcttattgggattaaagtcaaggtcccgcaccag

SEQ ID NO: 358 - DNA, 130 bp, Homo sapiens
gaggacgcggcacccagtagcggaggggccccgaggcaggacgcggcccgcgaggtcccaggcagcgaagccgcgcgcccggagcaggagcctcccgttgcggagccggtcccggtgtgcaccatcttca

SEQ ID NO: 359 - DNA, 92 bp, Homo sapiens
gcagccgcctctactacagcttcaagaacatcaccaagcagcacccgccgccgctcgcgcagcccgcgctgtcgcccgcgtcctcgcgctcg

SEQ ID NO: 360 - DNA, 29 bp, Homo sapiens
tggccgcccgggcagtagcagagcagcct

SEQ ID NO: 361 - DNA, 133 bp, Homo sapiens
agagccatttcttcaagaccggggagaatacctgggcaagttggtgaggttctgcaaagtagagttgcggctgcccagcgtgagcatcgtgagcaatggaagcctgatccgggagaggtggttccagaattat

SEQ ID NO: 362 - DNA, 64 bp, Homo sapiens
aggaacacgccaagctccatgggatgattcggactgaaataagcggagcggaaattgccgaaga

SEQ ID NO: 363 - DNA, 24 bp, Homo sapiens
aaaatcccactggccaacggacat

SEQ ID NO: 364 - DNA, 103 bp, Homo sapiens
gacagcctcctctgctaacaccctgtggaagacaaactctgtaagtgtggacggtggaagccggcagcgatcttcgtcagatccgccagctgtccatccaccg

SEQ ID NO: 365 - DNA, 208 bp, Homo sapiens
ctgacgggcgcctccaccttgctccctccctggctgccggcttccttttgtctttctgggcggcgatgagcgcagggccggcgcagcagctgcgggcgcacggaggcccgcgctgctagtcactcctcccggcctcggcgcgcttgtcccgggcagcggcccgggcccgctgcagccgccgccggcgccgaacttgggctcgggaagc

SEQ ID NO: 366 - DNA, 216 bp, Homo sapiens
cgcggaggcgatccgctcgttcctcccagggccatggggcgacgaggagagccctggcctccccgcgacccgcactgcgacctgggccagacgcgccaccttccccggtcgcggtttgcttctctttaaaatgaggacagctcctcccttgggggctgtggtgacaggtgaaatgagaacgcactgaagacagctcttggtccaaagccccgcaca

SEQ ID NO: 367 - DNA, 291 bp, Homo sapiens
tcttaaatttgaggagccggaatcatgccttcctcctaatctgcagggcctctttggagctgcccccgccagcagtgaagggtgcttgtcggccagggcgcctctccccgggcgcctggctggaggtggctggagctgggacgggcagggccctggctggggtggtggttggcagctcagctctcctcccttggctgcccttgctgaacccacccctgacctttgtgggcagctgcagtgtcaggcgggagctcggggctcttgctccaagactcttgagctcccaggaag

SEQ ID NO: 368 - DNA, 150 bp, Homo sapiens
gtcatctgtcaggaccggagctcactgcgccagacggtcgtccgcctggagctcgaggacgagtggcagttccggctgcgcgatgagttccagaccgccaatgccagggaagaccggccgctcttttttctgacgggacgacacatctga

SEQ ID NO: 369 - DNA, 228 bp, Homo sapiens
tccagctcccggactatgagctcgcccaccccgctgacgccaggctctgggccgcactccgcggcctggcggagctcgcggcggagctgacccgccgcctcctcggcgcgcgcgcggtcccggcagcccatgatcacccgcgctcccaggcgcagtagctcggcggccgtggcgcggcccaggccgctgttcgccccggtgatcagcacagtcttcccgtgcatgagg

SEQ ID NO: 370 - DNA, 187 bp, Homo sapiens
gaaaggccactgaccaagtccagaccctgaggacgacgaaggcctcggggcagaagcctgagagaatcatgccccactggcagtgggaggcggtgcaggctgggagccctgcccaggccccaggctgagctgtggggaaagctatgacccagtttgctgagagctgcaatgacgaacattggctctg

SEQ ID NO: 371 - DNA, 107 bp, Homo sapiens
gtccacggatgacacgtcctccgaggggtcctgtggagacagcttcctgcccgggccaaagagcccctcatcagggtccacctcctcgtcaaagatggtgagccggg

SEQ ID NO: 372 - DNA, 877 bp, Homo sapiens
gagagtctacctcaaagcgtgcagtcagtgcttgaaaggaaggaatgacaattccagcaggtacagagaacttaatggagggaatctcaatggtctgctcaggcacgatgatggtgggcaactcaaagtctgcgatcttgttggctactgcatttagatccaaagcagcaatgccatctgaaacactttttggaagcgtgaactgggacacagttaactgagattcaggcacggttatctcaaaaaagggaatcaaggagtcttctggttgagaatattttgttaacacatcaacttcagggaattttacctcggggagtgttggtaggttgagggcaaatgatgaagttctcagcttcttatagatttgtatttctctgaagtcaagtttgcacgatggaacctgaagatctgtaaatgggacatggaacgtaggcatgacaagaactgaatttagatcatttagtttcagcccaggaataatgaatttatcagccaaaacttttacagggatggagaatgaatagccattggggtttttggtgtacacaaaggcagttgaaacacgaagatgctgtctcctaccaatgctggtggttacatccagctttaggaaatcccataagctcttgtcatagactggtaggatgatatttttgaggaaccttaggtgtccttctaaggatcctgcaatgtcaaggtgtgccttttcttggtcattggaaagctcgacctggctctggaaagacccagaatgaatccggacttcatttttccatctgatcttctggttcttagtgttagcattcagggccacttcctggccaaggtcagggaaatcatggaaggaactgggctgacttgcatggacctgaac

SEQ ID NO: 373 - DNA, 51 bp, Homo sapiens
tttgcaactgtaatccagctccagtggggagttcaaaggcattctccatga

SEQ ID NO: 374 - DNA, 163 bp, Homo sapiens
gagctcgtcctgtcgaacctgcaggcagacgtcctggagttgctgctggagtttgtctacacgggctccctggtcatcgactcggccaacgccaagacactgctggaggcggccagcaagttccagttccacaccttctgcaaagtctgcgtgtcctttctcg

SEQ ID NO: 375 - DNA, 24 bp, Homo sapiens
atctcaaagaagtcctccgttttc

SEQ ID NO: 376 - DNA, 44 bp, Homo sapiens
ggagcaggcgaaccctttacgtccagatggcgagtccaaaggag

SEQ ID NO: 377 - DNA, 83 bp, Homo sapiens
cgcagcatgaagttattgaaggactggttgttgatgttggtgagcgtatccttcatggccagcgcgaagtcggccaggtcagc

SEQ ID NO: 378 - DNA, 81 bp, Homo sapiens
cgtactctggctcgtcatcgcctgctttggtggcattcttgtccccagcatcggaccccacgggctcaggcgtggtagcca

SEQ ID NO: 379 - DNA, 30 bp, Homo sapiens
tgtcattcatattagtcagagggcgaggag

SEQ ID NO: 380 - DNA, 960 bp, Homo sapiens
aatgagcagggctttgatcacccccagcagagcttggcgcttctctgctgggggtccctctgacagcgaaggtctcagcaacttcagcatggccatggctagtaccagcccattcacgcctatgatggccagcactggccccacgaaggtgtataacgcccctcccttcccatccaaccagcattccccctccctcaggtattgcccttgaggtaggtagagccccagggtgacacctgccaaccccagtgggcacaggtagcccaggagcaccatgagggggagaactcggtgctttgccagctggtgaaagacaaagagcagctggtgggccaacaccagggcctgcgccagcatccagaaaaaggtggccaggtagaggaaatgacagaggaaggcggcagcaaggcagagcgggcttcggggccctggagagaggaatggggcgcccaggaagcaagtgtctgcggccagcaagcagaacaccatgttgagcagggcggcgtggcggaaataggagatcttgttccgcaccacgactctccacaccagccagtacacacccaggcacacaagcagcgccagtatggaagctcccaagcccacttgagtcagcagcgccagagcgggttcttccggaacagtgtgtggggacatgaggacggagaaggcagtgaggtgctggcagaggcactgagcagtggggctggcactggccacctgtgcctggcacccttctttggaccaaccccccctgccctggaagagactgtgatcccagaagacacagtgaggggaaccatctgtgttcccaaagtccatgatgacctctccctggctgaaggcccggtcacctgccatgatggaaatgacaaggaccaggccaggagtggcatagagggaatcccccagcccttgtccatagtttgagggcagaaggtggtccagttttcgcagcac

SEQ ID NO: 381 - DNA, 105 bp, Homo sapiens
ggaccgggccgcttaggccacgcccggggaagagggcctgacgcgctgcggggcggggccgcggggccgggtcgcgcgagcagcggagcaccaagggaacggaaa

SEQ ID NO: 382 - DNA, 106 bp, Homo sapiens
gccctcaccgatccctcctacaaggcacagatcttagtgctcacctatcctctgatcggcaactatggcatccccccagatgaaatggatgagttcggtctctgca

SEQ ID NO: 383 - DNA, 213 bp, Homo sapiens
gtgccgcagcatgtgacgtttgaggttcatgctctggttgcagctgtagttgcaaaggctacaccgaaaaggtttgtcaccagagtggatgcgaccatgacgcttgaggttggccagattgccacaggcataagggcagagggggcacttgtagggcttctctcctgtatggacgcgctggtgccgtttcaggttatccagatgagcagaggc

SEQ ID NO: 384 - DNA, 96 bp, Homo sapiens
gagccggttgacttctctgctagaagagaccttgaacaagttcaattttgccaggaacagtaccctcaactcagccgctgtcaccgtctcctctta

SEQ ID NO: 385 - DNA, 90 bp, Homo sapiens
tctgcaggggaggctgctctatctggttactgctgtgtggctgcactcactctacgtggagttgggccctgcaggaaggacggacttcag

SEQ ID NO: 386 - DNA, 188 bp, Homo sapiens
ggcaataaggttgcgaagacgtcggttgtgctgaatcaactgaatcgtatggatggtgagactacatggctctgaggggatgtccagcatagtggggggcttcggcttgttggctgagggttggtgcaggggtgggtcatggacttccaccagacggaactcccgtgggagcaaatcgaaggaacttc

SEQ ID NO: 387 - DNA, 41 bp, Homo sapiens
cggcggagatgagaacatcggcaccgttaccaccctggcga

SEQ ID NO: 388 - DNA, 47 bp, Homo sapiens
gaaaaacagagtgggtactctcttctgggaagctggcaacaaatgga

SEQ ID NO: 389 - DNA, 82 bp, Homo sapiens
gtgcagggcgacccgaaacgtggcagggaaggaccgagggcagccaagctggacgcccgctccagcgggagaagcgcggtgg

SEQ ID NO: 390 - DNA, 24 bp, Homo sapiens
caaacgggtatatgtgtctttacc

SEQ ID NO: 391 - DNA, 428 bp, Homo sapiens
ggaggtgcacagcacaccttcctccactgggagaaagggggcccaattcccactcccccaaacacacacaagtacacactgactaaggcacagctagggcgggggcgggcagaaggccccttgggaggacgtggcgccacagctgcaatgggtgtgggggtgtggagctcatcaccgctggaggtgcttgggggcaggagaagaaaagcctcagggctccccaggaaataggagaagatggtcgggaaataggcagataagaaaaccaacaggaaacctagaaaagaattgagaggaaagaaacaaaagagagagtggaaaaagagaaacgggtgaaaacaggttgtgggcaacagaacaaaacaagaaggaaacagcagaggaaagggaagaacatacatcagagaactgggaaagtgcgatgaatt

SEQ ID NO: 392 - DNA, 124 bp, Homo sapiens
attaagtcacacgcctggaaaaggctgggaacagcgagagacaatgtcagtgtccactgggtctgggcttctccctcccaggacccgccaccccgtggaacaggaacatagcaccgagcaggga

SEQ ID NO: 393 - DNA, 49 bp, Homo sapiens
gttttgcgaccacaagcttcatgatgtcttaattgccccaggaacagca

SEQ ID NO: 394 - DNA, 166 bp, Homo sapiens
aatgggcattctccaacagtggtggtccatctctgtgcatggatgggtgtgtgtgctcccttttgtaagtttttggagggagtttagggatatgttgagaagtgctttgtcgtggaggaacaggcggcccagcaatggaatgaaggtccacttcttgtgtcaatgg

SEQ ID NO: 395 - DNA, 335 bp, Homo sapiens
gctcgagtatctccggcgctgctagtagcgcgccctccgcccggcggtacctgcgggtggccggggagtcctcgccggcgccagcgctgagccccaccggctgggaacgcggctgtgtccgcgccgccgaccctcgcgcccgagggctgcgcacaccgaggccgcggtgccctctcccaagccgcggggccgaccccctgagggctgcgggcgccgaatggagccgccggggcggaatagctccccgtctccggcgctccctgcggccgcgaatccggcggccgccccgccgccgtccagaggcgagaggcaaagtgagcgggttcggaggcggc

SEQ ID NO: 396 - DNA, 68 bp, Homo sapiens
ttcaggtagcggttgagtgcgatggctgtgaggaagacaacgctggccgtgcggttggtggacagcat

SEQ ID NO: 397 - DNA, 27 bp, Homo sapiens
cgcccccggtgccgtacagcagagcgg

SEQ ID NO: 398 - DNA, 86 bp, Homo sapiens
attggttaccaccctgaggagctgcttggccgctcagcctatgaattctaccatgcgctagactccgagaacatgaccaagagtca

SEQ ID NO: 399 - DNA, 27 bp, Homo sapiens
tcgttgaggtgcgaacggcggcagcag

SEQ ID NO: 400 - DNA, 220 bp, Homo sapiens
tgtcgcgacagagcaccctgtacagcttcttccccaagtctccggcgctgagtgatgccaacaaggcctcggccagggcctcacgcgaaggcggccgtgccgccgctgcccccggggcctctccttccccaggcggggatgcggcctggagcgaggctgggcctgggcccaggcccttggcgcgctccgcgtcaccgcccaaggcgaagaacctcaacgg

SEQ ID NO: 401 - DNA, 79 bp, Homo sapiens
tccacgcaccacaccactggaggcgctctcccttcactgcggttgggtcaatgtggacgttttccactcggccagctcc

SEQ ID NO: 402 - DNA, 84 bp, Homo sapiens
ccacgtaagtggaggagacgtgcccggtgcctcggtcgtcccattgccggtcttcgttcagggtatagaccttcactcgccgcc

SEQ ID NO: 403 - DNA, 113 bp, Homo sapiens
ctgcccggcgcctttgtccgctctgcgcccctggagtttctgtgcctccacgggcgggagcggggcgcgaaggtctgggggtgccccgaggacgcgccgcgtagtgagcctcc

SEQ ID NO: 404 - DNA, 24 bp, Homo sapiens
ttcaggtccttttgttcccatgta

SEQ ID NO: 405 - DNA, 50 bp, Homo sapiens
tgatgtcttacctcaaacaacccccatacggcatgaacgggctgggcctg

SEQ ID NO: 406 - DNA, 25 bp, Homo sapiens
gttctctgccgtcttctctcagttc

SEQ ID NO: 407 - DNA, 103 bp, Homo sapiens
ctgaactgtgctgttaacaagatgagtgtggacaacctggctactgtgattggtgtgaatctcatcaggtcgaaggtcgaagaccctgccgtgatcatgagag

SEQ ID NO: 408 - DNA, 24 bp, Homo sapiens
agggtcaagaacaaccagccagcc

SEQ ID NO: 409 - DNA, 78 bp, Homo sapiens
gcgcggcgcgaccggacgctgcgggcggggaagaggatggagactgtggcgtccgctgcaacggttggggctgcgcgt

SEQ ID NO: 410 - DNA, 34 bp, Homo sapiens
gcaaacacgtttccccgccagtcaggggcagcct

SEQ ID NO: 411 - DNA, 113 bp, Homo sapiens
cccagccgactcttctgcataggcccaaaggtgctcccggcccactgcacggagcccacctcatggggccggtgcttctcctgctccaggaggatgaggttctccactccccc

SEQ ID NO: 412 - DNA, 99 bp, Homo sapiens
atgcacaagacacaggaagataggaaatgcagaaggaggaggaggtgccggagaggtgaggacaggggctggatggacgctgggtggaaggcagggctc

SEQ ID NO: 413 - DNA, 118 bp, Homo sapiens
ctcctcagcctccgaggcctttgccacctccaacattctgcggctgctggagcagggccggctgctctctgtgcccagggcccctagcctcctggcgctgacccctagcctgccaggc

SEQ ID NO: 414 - DNA, 105 bp, Homo sapiens
ccagcaaggagtccgaccagacggcaatcgaccagacggcgatcgggagctactaccagctgttcgcagcggctgtgggcaacgtggaatggctgcgattctgtc

SEQ ID NO: 415 - DNA, 73 bp, Homo sapiens
gcaggtctggcgtcgacggaccctggagcggtgtctgacggaagtcggcaaagccacgggtcggcccgagtgc

SEQ ID NO: 416 - DNA, 138 bp, Homo sapiens
ctgagtcgggtccttggcttctctcaagccaaaccagctactcttggccttttcctccccactggatgagtgatgtggggaggcccccaggatgggaccccccttttcccccagagagcttcggcgacccaactcgct

SEQ ID NO: 417 - DNA, 82 bp, Homo sapiens
aaacagtggccgaaggcttgttatgtgctgtgcctggacttggcatgaaggcaccagatgtcagaagcgaggctgctgccca

SEQ ID NO: 418 - DNA, 194 bp, Homo sapiens
tctgctccagaaggcgcggagtcaaccttcccctatgctgccgctgcctgtagctgagggctgcccacctcccgccctcacagaggagatgctgctgaagcgcgaggagcgggcgcggaagcggcggctccaggcggcgcggcgggcagaagagcacaagaaccagactatcgagcgcctcaccaagactgcgg

SEQ ID NO: 419 - DNA, 562 bp, Homo sapiens
gtggactgctcgttgtactaggaattctggaggcacccgggctcgggcctcatcccccagtatctgctccctcccaatccagccatcagcatttagcagccccagccagtggccaagggcttcccgggtgagggagggatcccaccgctgaaccaccagctggtgaaagccttcatcccaaaggaagcctcgtgggaagaatgaccgggagggcactgctgtaaaaagaggtacgggtggaaagagggctgggtccaccttctgctcagacccttccaccccgatgtctggcaataccagcccttgtccgtagaagtagccaattccaccaaggaggccgctgagggcagcctgacccaaaacctgctcgccagagctcaggcccttctccttcagctggaaggtcttctcaaagcgctctctaaagccttcagcatggctctccagggcctgggtcagtagactgcctgccagtcttggcagggcttgatttcctcctgcctgggcactgcctgattcaaacacaaactctatggaaatgggaattttcagggtcacctgc

SEQ ID NO: 420 - DNA, 64 bp, Homo sapiens
ccacccatccagcctgttgtgagttgggtgagggctgcccccagtctccgtcctgcggctctgg

SEQ ID NO: 421 - DNA, 34 bp, Homo sapiens
cagagagcgggctcactcatgctttgcgggcggc

SEQ ID NO: 422 - DNA, 48 bp, Homo sapiens
cgacagcgcgccactccgcagcgtaacctcgcagatcccctgcgtgtg

SEQ ID NO: 423 - DNA, 35 bp, Homo sapiens
agagccacctgcaagatggacacgagccacaagct

SEQ ID NO: 424 - DNA, 104 bp, Homo sapiens
tttatactatggtggggaagctttctctgtagagcagccacagtcttttacttgtccctattgtggaaaaatgggctatacggagacatctcttcaagaacatg

SEQ ID NO: 425 - DNA, 158 bp, Homo sapiens
ggatagcgcttccgccctctaatgctctcgcgagatccgcgcgcggggcccctctccagtcccgcccctgctgcgcgcgtctctcagtctcccgctgccgccaagacgaagggcgggatttagggggcagctgctgatgtcggcgctcgccttcggct

SEQ ID NO: 426 - DNA, 65 bp, Homo sapiens
agccttggtactcggggaactgtgaccgctatgctgttgagagtgccctgctccacttacaaaag

SEQ ID NO: 427 - DNA, 93 bp, Homo sapiens
tgtccggccggtctaagcgggagtctcgcggttccactcgcgggaagcgagagtctgagtcgcggggcagctccggtcgcgtcaagcgggagc

SEQ ID NO: 428 - DNA, 41 bp, Homo sapiens
tgcgggcagggctgaccaactggcatgctggtaacattgag

SEQ ID NO: 429 - DNA, 24 bp, Homo sapiens
taattgtaatcttgtagacagtaa

SEQ ID NO: 430 - DNA, 25 bp, Homo sapiens
gcatatctttactctgacactgtca

SEQ ID NO: 431 - DNA, 28 bp, Homo sapiens
gtcctttgtgggtgccagcggctgtcct

SEQ ID NO: 432 - DNA, 77 bp, Homo sapiens
gggtgcggggatgcgccacgtgggcctgcagggcctcccggatgccgcgctgccagtctcgagccagctgcaccggg

SEQ ID NO: 433 - DNA, 35 bp, Homo sapiens
atgtcctggcagctaacaactaccccggccagcat

SEQ ID NO: 434 - DNA, 123 bp, Homo sapiens
gagagcacgatgttggcgaacagcgtccggcgcaggtccatgtcggacttgtgtatggcgaaggccaccacctcatggagcccctcactctcatccccgacaaggtccggctggaacagcagc

SEQ ID NO: 435 - DNA, 24 bp, Homo sapiens
tattgtgtccagaggatacaagct

SEQ ID NO: 436 - DNA, 26 bp, Homo sapiens
cagagggcacactcaaagtcagttac

SEQ ID NO: 437 - DNA, 184 bp, Homo sapiens
tcgaaacgggcatacaggcgtcggatgtctcgtttgctgatgcccaggaaatagtgctccaccttggttctgttatacacggtaatgcccggagggatagtcgggtatgacaccaggtggtcaatgccagcctcttttaagatgtatggggcatcgtcctccagggtctcgtggtgtccaatca

SEQ ID NO: 438 - DNA, 65 bp, Homo sapiens
atcgtcctgcgacctcacacagcagctcctgcctcagaccgttctgcagagcacgcccgctccca

SEQ ID NO: 439 - DNA, 76 bp, Homo sapiens
tcggctcctgcagatcggggtcgaggtcaaagacctcattatccagcagccttcgcagcgtcacgtcggccagctg

SEQ ID NO: 440 - DNA, 43 bp, Homo sapiens
taggagatgggtcctccatgccgagagtcactcctgccggctt

SEQ ID NO: 441 - DNA, 162 bp, Homo sapiens
gtagcctgttgtgtcaagatgattttagaagttaagccccagacaaatgcatcctgtgagtattccgcatcacataagcaagacctacttcttgggagcactggctctatttcttgccccagtctcagctgccaaagtgatgcacaaagtccagcggtaacc

SEQ ID NO: 442 - DNA, 54 bp, Homo sapiens
tctggagggcatcggaacctggaagccggaaagcccgatttgggagtgagaagc

SEQ ID NO: 443 - DNA, 78 bp, Homo sapiens
gactacttactactgatccacgtgtgagggaacggaagaagccaggccaagagggagcccgcagaaagtttacgtgga

SEQ ID NO: 444 - DNA, 128 bp, Homo sapiens
tcaaagctcaatccagacgtcagtctgtatgggaaaccttctcaccatccttggtcagaaataatcccttgcctgcaccactagtccacaacagctcagcgctgccttgtccagagattcacacatgc

SEQ ID NO: 445 - DNA, 122 bp, Homo sapiens
gagggcagcgtggccggcgactccgccttcagccgcgcgccgcgctgtgcgcaggtggagcgggctcagcactgcagctgcgaggccggattccacctgagcggcgccgccggcgacagcgt

SEQ ID NO: 446 - DNA, 138 bp, Homo sapiens
atcacgctcttccgcatggccacagcctctgcccccggccgagctgggcccaacagcctgcggtttgggatcgtgggtgggaacagccgcggccactttgtgatgcagcgttcagaccggcagactggggatctgatc

SEQ ID NO: 447 - DNA, 25 bp, Homo sapiens
ctccccaccatgaattttgttcaca

SEQ ID NO: 448 - DNA, 26 bp, Homo sapiens
tccctccccatggcaagatactacat

SEQ ID NO: 449 - DNA, 25 bp, Homo sapiens
gactctcacactgttcgctgtcttc

SEQ ID NO: 450 - DNA, 73 bp, Homo sapiens
atttctgctggtgagcatccggaggaatctcgggcattccacctccaccatccggcccggcacagaagagggc

SEQ ID NO: 451 - DNA, 235 bp, Homo sapiens
ggacacttccagcttgtgcagacaccaccctgccattgagtctggagggccctgttggagcctttggacctatagctcacggccagaaaaatcactggctttggaattaaatagcttagattgtactataaccactacttatgaactcagggactatgagggactattcaggggctatgaatctgagcctttgtttcttgaactgtaaagtggagatgatgtaaaccgccttgca

SEQ ID NO: 452 - DNA, 28 bp, Homo sapiens
ctctgcctgtgagtccttccatttcctc

SEQ ID NO: 453 - DNA, 36 bp, Homo sapiens
cagctaaggaaagaccggaatcgtccgagccctttg

SEQ ID NO: 454 - DNA, 72 bp, Homo sapiens
aatgtctctgagaaaggccgtgcacatacattgtggcatctaccatgccaatgcgccagtgcagagacagga

SEQ ID NO: 455 - DNA, 298 bp, Homo sapiens
aaatgcacaggatactgccagtcattaaatattgagtctagcacaatgtatgaagcataaaaattcactgccactggtttttaaacagctgtttcccccaaagaaagggcaacttctggtatgcaccagtaaaatagcaacctttttacattactttgcataaagatttacaagtgtcccaggacctgggaggccagtctataacaagacagcctttagcgacatcgctttccttctccacggtgatcagcgaacacaaatacccactgtgtgtcggcgagctggtctgctacatcag

SEQ ID NO: 456 - DNA, 101 bp, Homo sapiens
agtaatagaagtaactggaccaggaagaggaggcatctgctccaatgatgtcatagccattggtggccacgggggggtgggactggtcatgcagccgtgtg

SEQ ID NO: 457 - DNA, 26 bp, Homo sapiens
ctcttaagcagcatacggcactgctt

SEQ ID NO: 458 - DNA, 76 bp, Homo sapiens
agaattccggtggatgagactacggatccggcgaatggctgacgcatggatccaagcaatcaagtccctggcagaa

SEQ ID NO: 459 - DNA, 25 bp, Homo sapiens
cgtcgctgaactggccgctctcgct

SEQ ID NO: 460 - DNA, 31 bp, Homo sapiens
tttggggtcgtggctgcctatctggagtgct

SEQ ID NO: 461 - DNA, 137 bp, Homo sapiens
cagtcaggaaacgaagcaaggcttgggctgagtgaattttctattctacagggtatccaaagaggtcctttgttggcatttaacaggccggtggacttggtctggagcatcccggattgcttctcgcacctgtctgg

SEQ ID NO: 462 - DNA, 48 bp, Homo sapiens
gtgcccatgacagaaataccttataatgggtgatctgactggcatgga

SEQ ID NO: 463 - DNA, 119 bp, Homo sapiens
ctgtctccggtgtattccggctggcagtggcagtaaggctggtttccagcagtcacaatgcaggttcctccattttgacaaaaatcctcacagactgtcttaccacagtttggcccagt

SEQ ID NO: 464 - DNA, 39 bp, Homo sapiens
gtggtcgcccggtaaggaagcctgcgctggagactgctc

SEQ ID NO: 465 - DNA, 37 bp, Homo sapiens
ttggagcctggaatcgagcggcgtcatttacaaatgt

SEQ ID NO: 466 - DNA, 257 bp, Homo sapiens
gagtcagagtacccctgaggggtaatgctctgcaagtaagcccggttcatcagcagctcggtgggttccaagtgccctttctcgcgcgcctcgcgctccgccgcttcccgctcctccgcctcccgcttgcagtaggaatacctgtgattcatgtgctgcgagtacgagcccgagtgtgagaagcgcttgccacatttatcacactgatagggcttctcgcccgagtgaagccttgagtgctcgataaggtggtgctt

SEQ ID NO: 467 - DNA, 118 bp, Homo sapiens
ctggcgtgccaaggcgagacagctcctcaggggcttctgggtaaataatggctgtgtcactgcgctgaaggtactcctcgatgctgactgcatgaccatcgcgttcctccagttttct

SEQ ID NO: 468 - DNA, 1052 bp, Homo sapiens
cccggtttgaacatcgttctttcagaagtgctgaaaatgctgcaaagttggataagtggaaatgtggctgcccctctcctcactacttcctctctgatcgttctgaagcttgcattgggaatggctgctttctctaaccattttcagcttgagtgggtattgctgaagaaatccaacatcattccagcagttgaaaaaggaagccttcgggagaaagtgcttgtcaaaattttgttctttgtgcttgtgtatgagtaagttgccatgaataagttattattttaacccataattggcgactgtttatatgaattctttctttggcaccaaataggtttcatcttcttaggcacaattagaaaaaatccacatagatggatattttacatttagttattgctttatccaaatacatgaatctaaagctgaatcaacccttacttccagttgtgcttattaagaagatcaatttccaagtagtaaagttttcagggaaactgactgtgctgctatttgttttgacaaatttgggggtaagtcaatgacaaccaaaccaatctcggtggaaactcctatcctatcatgttgtgtgcccaagatgagtgagctggcactgtgccctgaagctttcaccactgtaatgaaatatatgccaggggagactttgggcttttctcatgactgtgtgggtcgaaggtagctcaagtgtgtgtgtgtgtgtgtgtgtgtgtgtgtgtgtgtgtgtgtgtgtatgtgtgtaaagtgctaagaactgtgcattgacatccaaacatttcttgtacaaaatttccctagcaaagcaaacctgctttgacttaatttatttgttaaatgttgcactttgtttatgtatgttttgtttttggtggggaataaggagagagaggacgacaaattctattgaagtatttattttgtgaagatggcaattttgcatttgtttaaatttttttcattctttaattttgttatcagtgccagcccaatatacctgctctaccattatttgcggtctgataaaagggtccttg

SEQ ID NO: 469 - DNA, 75 bp, Homo sapiens
ggctgccttgataggaatggcatctacccgcatgtcataacctttcctcttggcttcttctaggccaagcttata

SEQ ID NO: 470 - DNA, 78 bp, Homo sapiens
cgtaacctttcagtgacggccccactaacaccaccggacgcattgacggtacaacatcgtaaggaggaatgtgctccg

SEQ ID NO: 471 - DNA, 115 bp, Homo sapiens
gggtctatatgcatccggattcccccaacactggggctcactggatgcgccaagaaatctcttttggaaaattaaaacttacgaacaacaaaggagcttcaaataacaatgggca

SEQ ID NO: 472 - DNA, 30 bp, Homo sapiens
tgccgcacaccaacgggctgctgtcgccgc

SEQ ID NO: 473 - DNA, 30 bp, Homo sapiens
tgggcggccagcggcgaatcccgggcagcc

SEQ ID NO: 474 - DNA, 68 bp, Homo sapiens
agtggtgactagtttgtagtaggctcctttttgggccatcagttcttcatgggtccccttttcaatca

SEQ ID NO: 475 - DNA, 88 bp, Homo sapiens
catcagaggcatcaaaacaatctgtttcttgatcacaataccaatgttgaggaatacagcgcccagatgcgcattggaactcactgct

SEQ ID NO: 476 - DNA, 160 bp, Homo sapiens
agaacctcccagggcgaaggtcggggccgagaagcttgtgagtaccggggcagtgagggagggatccctaagtgcagggcgcacacacggggcggagacctggaggcggcagcaccgcgcccccagggctctgcccagctagccactcgcagcacagaga

SEQ ID NO: 477 - DNA, 136 bp, Homo sapiens
ctgtagagtccaaagaagccctcataacgcaagactttcttaaaacagtcaaagctgtttttgtacattagctccccaacaacagagccagagccacgctggttttgcattcgggtcttcaccagatctataggat

SEQ ID NO: 478 - DNA, 119 bp, Homo sapiens
gaccgggaggtcaataactgcagcgtccgagctgagcccaggggagcgggcgaggagaaagaagcctcagagcgcccgggaagcctcgcgcgcctgggaggcttccatctcccgggacc

SEQ ID NO: 479 - DNA, 112 bp, Homo sapiens
tcttctcgtgggagctcccaaagcaaacaccacccagcctgggattgtggaaggagggcaggtcctcaaatgtgactggtcttctacccgccggtgccagccaattgaattt

SEQ ID NO: 480 - DNA, 36 bp, Homo sapiens
ctactcgccctcctaatggtcaaggacctcaaggcc

SEQ ID NO: 481 - DNA, 25 bp, Homo sapiens
aaaggtccagctgggatacctggat

SEQ ID NO: 482 - DNA, 24 bp, Homo sapiens
cttccctggtgctcgtggtcttcc

SEQ ID NO: 483 - DNA, 25 bp, Homo sapiens
gctgtccttgtaaaccctgtggtcc

SEQ ID NO: 484 - DNA, 154 bp, Homo sapiens
ggaggaacatttaagctgatggaagtggaagtggaagttgctgtacattggcagcaaggcctccgagttagcttttgaatgcagttaactggtttctcttaactgtggaattcattgaaaagtcagactccgagtggtcgttccaggatatctt

SEQ ID NO: 485 - DNA, 25 bp, Homo sapiens
tcattcgttctggtgccagcatttt

SEQ ID NO: 486 - DNA, 774 bp, Homo sapiens
ttttctacgtgaacgcggcgccgcacatcgggcacctgtactcggcactactggcggacgccctatgccgccaccgtcgcctccgaggtcccagcacggccgccacgcgattctccactggtaccgacgagcacgggctgaagattcagcaggcagcagctaccgcgggcctggccccgaccgagctgtgcgaccgagtctctgagcagttccagcagcttttccaggaggccggtatctcctgcacagatttcatccgcaccacggaggcccggcaccgggtggctgtgcagcacttctggggggtgcttaagtcccgcggtctgctctacaagggcgtctatgaaggttggtattgcgcttccgacgagtgcttcctgcctgaggccaaggtcacccagcagccgggcccatcgggggattcgtttcctgtatctctcgagagcgggcatccagtctcctggaccaaggaagaaaactacattttcaggctttcccagttccggaagccactccagcggtggctgcggggcaaccctcaggcgatcacccccgaaccatttcatcacgtagttcttcagtggctggacgaggagctgcccgacctgtccgtgtctcgcagaagtagccacttgcactggggcattccggtgcccggggatgattcgcagaccatctatgtatggctggatgccctggtcaactacctcactgtaattggctacccaaatgctgagttcaaatcttggtggccggccacctctcatatcatag

SEQ ID NO: 487 - DNA, 28 bp, Homo sapiens
ctggaggtggtgcaagattcataaacat

SEQ ID NO: 488 - DNA, 25 bp, Homo sapiens
aactgctcctcaggtgtagttatct

SEQ ID NO: 489 - DNA, 106 bp, Homo sapiens
cctagtgaaaaatgatggaacctgtgttattagtgactttggactgtccatgaggctgactggaaatagactggtgcgcccaggggaggaagataatgcagccata

SEQ ID NO: 490 - DNA, 24 bp, Homo sapiens
acctgttcggcccggcccggcgtg

SEQ ID NO: 491 - DNA, 94 bp, Homo sapiens
gatgtcaccggacgaacccaggaagagcttgtggccatgctcaggagcaccaagcagggggagacagcatcgctggtcattgcccgccaagaag

SEQ ID NO: 492 - DNA, 546 bp, Homo sapiens
cactgtagggagacggcacatgctcactatcataatggcttccatggggtgaggagtgtgagtgatcactgctgtattgctgtcgtgaggtgattaggtcatctgccttgctcagcagctgggcaggatgtggcctctgggaggcatggctgccgtcatgaagtccatgaaactgtcctgggaaggctctctccccaagtgcactctggctgatcagagtggcagaagtaaggccaacgttggctggggcagagaactgcccctggatctgccctgccaggggtgtaggtgggtttgacaaggtagcagaacggagcaggttctcatccagctctagactagaaaaattatcatgtactatacgcccattcaatagctcccctaggtctgtgttcacctctcggctcaaggattgtattcctgaagctccagtacctgtggagaacacccctattcctctatctgacaactcctggactggcacaccatctgactgggcaaggaccccaatggtactcaggcactcgagagaagttacagcctgca

SEQ ID NO: 493 - DNA, 27 bp, Homo sapiens
aggcagacatccagtggcccttttgtt

SEQ ID NO: 494 - DNA, 1295 bp, Homo sapiens
tgagcatgagcacccagtactcgggcttggcgcgcggctggccggtgtcgtggcccgggcaggcgcaggtgagcgccgcctcccagctctcgcggtagtgctgctcgtacaggtagcaggccaccacaatgctggcggggaccgtgtagagcagcgtgaagatgccgatgcggatcatgagcttctccagcttgtccgtcttggtgccgccctgcttgatgacgctgcggatgcggaagagcgacacgaagcccgccagcaggaagagcgtgcccaccagcaggtagagcaccagcgggcccagcacgaagccgcgcagcgagttcaggttctggttgcccacgtagcagatgccggccactgggtccccgtccacggagctcagcgccagtgccgtgatggacttgacgctggggatgagccacgcagccaggtggaagtactgcgcgtagcccgcgatggcctcgttgccccacttcatgccggcggccaggaaccaggtgagcgacaggatgacccaccagatggagctggccatgccgaagaagtagaccaggaggaagacgatggtgcacagtgcagggcccgtggtctcgtagtggatgtggttgtgctcgcggctgcaggccacgctggcatggcccacgaccagacgcaccaggaagcccagcgacacgcacaggtagcaggctgacaggaagatgatggggcgctcaggatagcggaagcgttccatgtcgatgaggaaggtggccactgtggtggacgtggagatgaagcacagcaccgaccacaggcctatccagaaggtggcgaacgtgcgctcgtcggcactgaaggacggctggtagcagggtaccgcgcagttgggcacctggcccgtccgcaccttgttgtagagcgggtgtgactccttcagaatgggcacgaagggctcgcgacacttgcacacgaacgggcccccagcggggcattcgccccccgaggccggcgcccctggcgggcctggaagggtgggcttggctgggaaaggcctggggggcgccgtggtggcctcgctgcggttgtaatccatgcagaggacctcggcgtcgcggcccagcaccgggaggcggtcgcagctcatgcgctcgggccaggcgaagccgtactggcgcatcagcggcgagcagccggccttggcgcgctcgcacaccgagcggcagggcggcagcggcttgtggtagtcgggcagacagatgggcgtgtacatagagcataggaagaagcgcaggtccggcgagcattggatctcc

SEQ ID NO: 495 - DNA, 29 bp, Homo sapiens
ccacggatcccgccgagaagagcagacag

SEQ ID NO: 496 - DNA, 104 bp, Homo sapiens
aaacagaagttcaggcccactctccctccaggaaattcattttaaaacctgctatcaaatatactagaccaactcatctctcctgtgttaagcggaaaaccaca

SEQ ID NO: 497 - DNA, 83 bp, Homo sapiens
agacatcctagtctcctgtggcgaggaccgactctggaaggtgttgggccttccaaaatgcaatgtgcttctcacgggatttg

SEQ ID NO: 498 - DNA, 87 bp, Homo sapiens
agtggaggcgtcgatgaccacaggggagctccgagcattgtcattcaaggtgtacaggtagatcttgtagtcagtgcctggttgtaa

SEQ ID NO: 499 - DNA, 336 bp, Homo sapiens
gccgctacgtcaccttaactgggaccatcacacgagggaagaaaaagggtcagatggtggacatccatgtcacattgacagagaaagagctgcaggaactgaccaaacctaaagagtcatcaagggaaacgacgcctgaaggaagaatggcctgccagatgggagctgaccgtgggccccatgtggtcctctggacgctgatctgcctgcctgtggttttcatcctttcttttgttgtctctttctactacggcactatcacctggtacaacatcttcctcgtgtataatgaggaaaggaccttctggcacaagatctcgtattgcccttgcctcg

SEQ ID NO: 500 - DNA, 85 bp, Homo sapiens
aggacctgtgccagcagttccaactgtcggagaggcatgctgtggccgtgctgtccatcaccgctgccaatatgggcctcacctt

SEQ ID NO: 501 - DNA, 26 bp, Homo sapiens
tcagacttgggctccggaaggctgag

SEQ ID NO: 502 - DNA, 32 bp, Homo sapiens
ggcggctcggcaggcgggttcaggcttcgggg

SEQ ID NO: 503 - DNA, 365 bp, Homo sapiens
tcgaagtctatgggctcctgctgcccgccgtgggtgctgctgccttcctctctgtccgcgtgctggccactgcccaccgccagctgcaggacatctgccggctggagcgggcagtgtgccgcgatgagccctccgccctggcccgggcccttacctggaggcaggcaagggcacaggctggagccatgctgctcttcgggctgtgctgggggccctacgtggccacactgctcctctcagtcctggcctatgagcagcgcccgccactggggcctgggacactgttgtccctcctctccctaggaagtgccagtgcagcggcagtgcccgtagccatggggctgggcgatcagcgctacacagcc

SEQ ID NO: 504 - DNA, 116 bp, Homo sapiens
tgactcctaccagagcatccgtccagctcagccatccagcctgtctctaccgggccccacttctctggatcagagaccctgcctctgtttgaccccgcactgactgaataaagctc

SEQ ID NO: 505 - DNA, 93 bp, Homo sapiens
ttggcaaatcagctaactgaagacagcagccagctcaggccatccctcatctctggcctgcagcatcccatcctgtgcctgcaccttctcaag

SEQ ID NO: 506 - DNA, 45 bp, Homo sapiens
gcagcagcctgtctattgggacagcttggtcagcaaggggtgacc

SEQ ID NO: 507 - DNA, 544 bp, Homo sapiens
ccatcgtctcgtttctctcagttgccctcctgagtgaccagccactgttgacctccgaccttctctctctgctggcccatactgccagggtcctgtctcccagccacttgtcctttatccaagagcttctggctggctctgatgaatcctatcggcccctgcgcagcctcctgggccacccagagaattctgtgcgggcacacacttataggctcctgggacacttgctccaacacagcatggccctgcgtggggcactgcagagccagtctggactgctcagccttctgctgcttgggcttggagacaaggatcctgttgtgcggtgcagtgccagctttgctgtgggcaatgcagcctaccaggctggtcctctgggacctgccctggcagctgcagtgcccagtatgacccagctgcttggagatcctcaggctggtatccggcgcaatgttgcatcagctctgggcaacttgggacctgaaggtttgggagaggagctgttacagtgcgaagtaccccagcggctcctagaaatggcatg

SEQ ID NO: 508 - DNA, 24 bp, Homo sapiens
ctgcgcagtgcgtgctccagcccg

SEQ ID NO: 509 - DNA, 151 bp, Homo sapiens
cagccgcttccaccgcgccacgctcatccggccgcacaaccgcaacggcggccagctggagccgggcccagcgggggcaccctcgccggctccgggcgctcccgggccgcgccgacgggccagccccgccgacctggtctacttcgaaaag

SEQ ID NO: 510 - DNA, 92 bp, Homo sapiens
ccccctgctaagtgcggcaggtggagtaaactctggattagaggacggttgacggaggctcccgggccctccccgggatgccgatgggatcg

SEQ ID NO: 511 - DNA, 85 bp, Homo sapiens
tgggtagcggatgaagaacccgggggctggacccggcctagctctggacccggctgccaggggctcgcagtcttcccgcgctccc

SEQ ID NO: 512 - DNA, 36 bp, Homo sapiens
gccaggcgtgacccctagcggcatgtcggagaggct

SEQ ID NO: 513 - DNA, 117 bp, Homo sapiens
tagaatataggcaccaacacattgagtgcccgttccaaacccatgagccccaggcagatgagcaccaccagctgcagagctggactccctcgaggccacaggtagccactcaggagg

SEQ ID NO: 514 - DNA, 121 bp, Homo sapiens
gcgggaggcacagcaccgacggcaggggcggcccaaggcccagcaccaagatccaggcttgggggggacccaggagggtgcgaggggtgaagcaaccaaacgcagtccatccccagaggag

SEQ ID NO: 515 - DNA, 61 bp, Homo sapiens
tttccgagctccgggcgctcgctcccgggccggagccgcagcgacgctggcgggagcctgc

SEQ ID NO: 516 - DNA, 119 bp, Homo sapiens
tgtcagacctgacccaggcagccaacaagaacaacgacgccctgcgccaggccaagcaggagatgatggaataccgacaccagatccagtcctacacctgcgagattgacgccctgaag

SEQ ID NO: 517 - DNA, 35 bp, Homo sapiens
agtcccagccagaaccgccgttcttctgacactgg

SEQ ID NO: 518 - DNA, 24 bp, Homo sapiens
ctacggccagccctgcccagcgag

SEQ ID NO: 519 - DNA, 26 bp, Homo sapiens
ggaactctgtcgccccttgttggtgt

SEQ ID NO: 520 - DNA, 259 bp, Homo sapiens
cggccctacaattgctcagagatgcccagtctcatacatttaatggcaacagagtgagagcttcccctgccccctacaacagagcacaattcacagttctagaatcccaggggctgaaagtggttaagaaagaaagatttacaaaacagaaaaactaagcagaatagaaatgtttgttttgattcctagtgtccctctggtctttcagttccatgtcgttactcaggcgcagagacaccgcgcatgaagggaccttgat

SEQ ID NO: 521 - DNA, 24 bp, Homo sapiens
ctggtggaccaggaaatcccagtc

SEQ ID NO: 522 - DNA, 25 bp, Homo sapiens
aaaaggtccacctggaactgcagga

SEQ ID NO: 523 - DNA, 163 bp, Homo sapiens
agctgcctgcagcgatttaccacaatgccattcttattctgcaatgtcaatgatgtatgtaattttgcatctcgaaatgattattcatactggctgtcaacaccagctctgatgccaatgaacatggctcccattactggcagagcccttgagccttatataa

SEQ ID NO: 524 - DNA, 135 bp, Homo sapiens
gttgcaatagcttctacggccccattatagatggaagaatcttgggatggcgccttgtaatcccacaggatttgaacatagttcaaaacctggttaaaacctgctgtggcgaaagcccaccatagagaccagtag

SEQ ID NO: 525 - DNA, 105 bp, Homo sapiens
ttttggcagaggagacgctggcgagactgtcgatcgcgccggggggcgaggggctggggtcccgctttacatctggggtcggtgtccgcgggatgtgcgtcctgg

SEQ ID NO: 526 - DNA, 29 bp, Homo sapiens
ggtgacaagggttgctggcacaaggatct

SEQ ID NO: 527 - DNA, 79 bp, Homo sapiens
gtgccataactcatcatgcttttttgcatttctaggggaagttttcgttggagctgtttgggctcttcctcttttacca

SEQ ID NO: 528 - DNA, 67 bp, Homo sapiens
taatagcaaagccgacggccaggtggtctccagtgaaaagaaggcgaacgtgaatctgaaagacctt

SEQ ID NO: 529 - DNA, 24 bp, Homo sapiens
cctttacttccagtgacctgtggt

SEQ ID NO: 530 - DNA, 29 bp, Homo sapiens
tccaccatgttacgagcctccttggcacc

SEQ ID NO: 531 - DNA, 55 bp, Homo sapiens
ccagctccttgtgagcatccaaagcagtgcactcccgctcagacctctcttctac

SEQ ID NO: 532 - DNA, 45 bp, Homo sapiens
gaagtcgccactgaggtcccattccgcctcatgcaccctcagcct

SEQ ID NO: 533 - DNA, 66 bp, Homo sapiens
atggcatacgaggccaagctcccccggcaggcctcctcctctaccgtcaccgaagacttcagcgag

SEQ ID NO: 534 - DNA, 62 bp, Homo sapiens
atccgagaaatagctcagtctcaccgggacatggagcaggaactggcccacgccgtcaatgc

SEQ ID NO: 535 - DNA, 25 bp, Homo sapiens
gggcggacagcaggaccggctcttc

SEQ ID NO: 536 - DNA, 33 bp, Homo sapiens
aatgccttgttctcctatcagccctggaggacc

SEQ ID NO: 537 - DNA, 148 bp, Homo sapiens
tgcatggccgctacttcaggagctgccccatctcaggcagggccgtgcgggacccgcccggcagcatcctctaccccttcatcgtggtccccatcacggtgaccctgctggtgacggcactggtggtctggcagagcaagcgcactga

SEQ ID NO: 538 - DNA, 125 bp, Homo sapiens
ggaacacgcccacatcgtgaggcgccaggaactccacaaacttggcatcgctgaaggcatctcttttacagtgaaatatggatgcaacctggtcagagatgtacaggatcttcccagacaccagg

SEQ ID NO: 539 - DNA, 106 bp, Homo sapiens
ttgctaaggccgcgcagccctagtgaccgaacgccctgcggcggccgcgcaggcgctgtggtgggctccggtgcactgtgggatggaaaccggagcggcgcgtcct

SEQ ID NO: 540 - DNA, 308 bp, Homo sapiens
ttgaaagaagaccgcaagccaagagaaaaggacaaggacaaggagaaggccaaggagaatggcggaaacagacacagagaaggggagagagagagagccaaagcccgggccaggccagacaacgagcgacagaaagacagaggcaacagggagcgggacagagactccgagcgcaagaaggagacagagagaaagagtgagggggggaaagagaaggagagactgagagacagggaccgagagcgcgaccgggacaaagggaaggacagggacagacggagagtgaaaaacggggagcactcctggga

SEQ ID NO: 541 - DNA, 80 bp, Homo sapiens
ggtgaacgggcacctagagagtacccagatccttctcgaagctggcgcggaccccaacggaagccggcaccatcgcagca

SEQ ID NO: 542 - DNA, 225 bp, Homo sapiens
gtcaactgaattcggcagctcggccgcctgttgccacaggctcctttcttccacggcgtcccttgcgggacccgccagagtgtgcttggcttccgcgtgtccgtgtgtctgcgcgtcgccggcgtctgtcccgtgttccctgtgaggctgccacgcccaggcgtgcatgtgcgtctcgagacctgtgggcctgggcggcagaaaggcttcccgtggctgttgcac

SEQ ID NO: 543 - DNA, 26 bp, Homo sapiens
tgccggttgagggggttcgtgccata

SEQ ID NO: 544 - DNA, 32 bp, Homo sapiens
cccgggcggacgcggacgtcgctgccagcttc

SEQ ID NO: 545 - DNA, 31 bp, Homo sapiens
tcccggacgcccttgacccatgccctcccag

SEQ ID NO: 546 - DNA, 81 bp, Homo sapiens
gagggatgagtgccgagctcacccgtgcagaaatggagggtcctgcaggaacctcccaggggcctatgtctgccggtgccc

SEQ ID NO: 547 - DNA, 110 bp, Homo sapiens
ggtggacgcctgcgactccagcccctgccagcatggaggccggtgtgagagcggcggcggggcctacctgtgcgtctgcccagagagcttcttcggctaccactgcgaga

SEQ ID NO: 548 - DNA, 76 bp, Homo sapiens
tcgagtctgaagaatccggcgatgaagaagggaagaaacacagcagtggcatcgtggccgacctcagtgaacagag

SEQ ID NO: 549 - DNA, 133 bp, Homo sapiens
gccggcgacagtggctccgacacgggcaggcccgggcgcgggagtggggattccggtgaccccttgttgaccctgcgggaattcctctgcactgtcgtcggtgctgggcctcggggcgtcgagtgcggtcgag

SEQ ID NO: 550 - DNA, 28 bp, Homo sapiens
aattaggctgagtgcagtggctaacacc

SEQ ID NO: 551 - DNA, 63 bp, Homo sapiens
gactaaatttgctctaaagtaagtttgtaacaatttacatttccaaagtgtactcttctctcc

SEQ ID NO: 552 - DNA, 51 bp, Homo sapiens
ggggatcctcatggtcttcggcctggcacccgcccaggggctgagacagtg

SEQ ID NO: 553 - DNA, 72 bp, Homo sapiens
cgtctgggttctgctacctgagcacagcctggtcccgggatgcctggacggcggtggtgtccagtacctgct

SEQ ID NO: 554 - DNA, 402 bp, Homo sapiens
tggctcctgttctacgccttgtcagggaagatgtgggttcgccccaggtgctccagaaaggtcgtgttctctatggaatgaagacgggtgggcataagcgtgggtccggggccaccctctgtcgtccgccggcgtgtttctcatccagccacgtctcggaaggtctgtgactgctgaaaacattctgtgcatgaacgttggggaaggaaacccacccagaggaggggcaggcgccaccccaggcgtcagagcaccaagccgcagagaacggaggcagcaggtgcccgggacacaccggggagaccgcaggagcagcccgtgtcttctgtggctcagtcccgcgagaaactggaggccagcgcttcacagctcccatttgcagagaccagctcccgtgaatga

SEQ ID NO: 555 - DNA, 74 bp, Homo sapiens
ttctgaaccccgtcaatgctggtcagcccctacatgctagcagccatcaactggtagataacccaggctgcaat

SEQ ID NO: 556 - DNA, 166 bp, Homo sapiens
agtcatatgatccgctcggcttcctgggtctggctgctgccgcccgccggtgtccgcccgtgtcgcgccggggcaccaaggagccgttggagggtccgggcggaggcccgctcgtgtggaagtcgtcgacgccgccgctcgtccgtcctcccgtccgttctcgctc

SEQ ID NO: 557 - DNA, 34 bp, Homo sapiens
cctaagtgcatcagtggcgctggggatgctatac

SEQ ID NO: 558 - DNA, 66 bp, Homo sapiens
atgaggtagaggtggcccccactctcatagatgtcatccagggctacaatgttggggtgcttgatc

SEQ ID NO: 559 - DNA, 96 bp, Homo sapiens
agaacctctggcaagccgcccgactgcaactgctgaccctgcagagctggctgctggacgcaccgtgctcgctgcccgcagaagcggcactgtgct

SEQ ID NO: 560 - DNA, 33 bp, Homo sapiens
tatttgatagtcatcctgttctgcatgtatgtt

SEQ ID NO: 561 - DNA, 170 bp, Homo sapiens
tacgtgatcacagacctgacccagctgcggaagatcaagtccatggagcgggtgcagggtgtgagcatcacgcgggagctgctgtggtggtggggcatgcggcaggccaccgtccagcaacttgtggacctcctgtgccgcctggagctctaccgggctgcccagatcat

SEQ ID NO: 562 - DNA, 30 bp, Homo sapiens
cttggggaccgaaggactgtcattgacaaa

SEQ ID NO: 563 - DNA, 186 bp, Homo sapiens
cgccgggcgggtggtagaaggacagccccagggagatgatggcggcaatctccaggatgatgagcgtcacgtcctgcagcgcctcccacacgagctgcaggaaggtttttggcttctttggaggtataaagttttgcccaaaaatttgctttctcttttccaggtctggagcggtgcccggcaaac

SEQ ID NO: 564 - DNA, 67 bp, Homo sapiens
tggcctttattgcgtaccccaaggcggtcaccatgatgcctctctccccgctgtgggccaccttgtt

SEQ ID NO: 565 - DNA, 24 bp, Homo sapiens
tacaaactgtgggtggacacctgc

SEQ ID NO: 566 - DNA, 44 bp, Homo sapiens
ggctccgtcgatgttttccggttgctctgggttgctggtcctca

SEQ ID NO: 567 - DNA, 25 bp, Homo sapiens
gccacaaacagccgcagcctggctg

SEQ ID NO: 568 - DNA, 53 bp, Homo sapiens
caacagcccagataaggaatgaaaaccaacagtggggaccgatggcccaagct

SEQ ID NO: 569 - DNA, 26 bp, Homo sapiens
gctgtggttcctgatgcctcgtgaac

SEQ ID NO: 570 - DNA, 27 bp, Homo sapiens
ggccaaggacgaggctgctctgtccca

SEQ ID NO: 571 - DNA, 24 bp, Homo sapiens
caggagaccctgaacaggtttcag

SEQ ID NO: 572 - DNA, 64 bp, Homo sapiens
gacgccagcgccagaagctcggatcgcggctgcaccgggagagcgccgatctgggtgcgaggca

SEQ ID NO: 573 - DNA, 27 bp, Homo sapiens
ccctttggtcctgtcttgccaggaagc

SEQ ID NO: 574 - DNA, 30 bp, Homo sapiens
agagaccttatttatattcaggggagcacc

SEQ ID NO: 575 - DNA, 63 bp, Homo sapiens
gtgccctggagccggttgggttgagcgcccctgcccggggaaggtagcctgcgggctcttgcc

SEQ ID NO: 576 - DNA, 29 bp, Homo sapiens
tcctagcccgaccggttcgtggcagagaa

SEQ ID NO: 577 - DNA, 62 bp, Homo sapiens
cagaagccaggctacgtagggccgcccccaaggccgccgagtttcgattccttagtgtttgg

SEQ ID NO: 578 - DNA, 95 bp, Homo sapiens
ataactcgtgctcacaggaagccacgcacccttgaaaggcaccgggtccttcttagcatcgtgcttcctgagcaagcctggcattgcctcacaga

SEQ ID NO: 579 - DNA, 27 bp, Homo sapiens
ggcctccgcgtccagggcgaaggagcc

SEQ ID NO: 580 - DNA, 95 bp, Homo sapiens
tatctgccttaagtcgagagccgaccgtggacatatctccagatactgttgggaccctcagtcttattatgctggcacaggctcaagaagtattt

SEQ ID NO: 581 - DNA, 36 bp, Homo sapiens
cctggactgcttcgggctgaacttattcttgatgaa

SEQ ID NO: 582 - DNA, 48 bp, Homo sapiens
gcaccagcgccacgatcaacgggggcctgcgccgggaacaactgatgc

SEQ ID NO: 583 - DNA, 61 bp, Homo sapiens
tggtgatgacagcagtctggcggctggccacgtcccggctcacgccatggatctccactgt

SEQ ID NO: 584 - DNA, 474 bp, Homo sapiens
ggtgtctcccacatgtctactatggcaaaaaacattaccatccccacccataccacagcatcccctagagagagtgaggtgcagggacccgagggccaggttagcacagcgctggccccagcatggagggaagccctgtgggccacggtaggctagaagggaattcgagctgggcatgaaaaggatgctccggggccattgttagtgggtttggggctgagatgagtgatcctgcctctggtcccagcatccagctgcctcgttgtctatcctgggagggtgtggtgcttcggacacgttgaggggctttgtcagcatcaggaaggcctttgcttcttgcacccaggcccagctgagacaggcccctgagtcctggctcatgttctggcagcaacttcacttttcctaaggaggggaggaggcagcagggaagcaaccctgggttttcagaaggtccttctgatggctaggcta

SEQ ID NO: 585 - DNA, 65 bp, Homo sapiens
tctttggtcagtagctttgctgcttccctgttccttggctcttactcccctattgactacagtga

SEQ ID NO: 586 - DNA, 25 bp, Homo sapiens
ctcgccctcctctggggatcgctgt

SEQ ID NO: 587 - DNA, 99 bp, Homo sapiens
tgagccgcgggcttgcttctctgccatgcgcttctcgatggctgccagggactcccgtgtgaacctgcggaagctgctggtgccccgaggtaataggaa

SEQ ID NO: 588 - DNA, 52 bp, Homo sapiens
agcgtttccaccctcacgcttttactgcagccggtcttctcgactggaatgc

SEQ ID NO: 589 - DNA, 85 bp, Homo sapiens
ggtgtttgtggtctgtagcagctgtggtctcagggttcgtcgttcctctggaggttcttgttcaaattggttctgttctgctggc

SEQ ID NO: 590 - DNA, 101 bp, Homo sapiens
ggcccagagctctgaccaaggccccatagctgcctccccatcctctgcactctcccccaaccctgaggccatgtgctctgactcggagacctcctccgcag

SEQ ID NO: 591 - DNA, 24 bp, Homo sapiens
gatattccagctggagcaaggaga

SEQ ID NO: 592 - DNA, 29 bp, Homo sapiens
atgggccagcctcgaccctgcgcagaggg

SEQ ID NO: 593 - DNA, 110 bp, Homo sapiens
ggtactcatactcctcggcactgcgacggccaaaatccatccagcccatgtagtcccggtcacttatcctgtggctggggtccaggttctgcaggttcttaacgatggac

SEQ ID NO: 594 - DNA, 102 bp, Homo sapiens
gcagggcgtcctgggctggaaccccaaataccggcacccgtcgggaggcagcaacggcgccacgtgcagcacgcaggtttccatgctgacccgcgtcagccc

SEQ ID NO: 595 - DNA, 29 bp, Homo sapiens
gcttccaagccgaagtctccctggtctga

SEQ ID NO: 596 - DNA, 25 bp, Homo sapiens
tttgccacctgagacctatgaggag

SEQ ID NO: 597 - DNA, 109 bp, Homo sapiens
gtgtccggcttcggtgccgagtgccaccgcgagtgggccgagacgcggagggaggcgcggccggagctcgggtcgccgacgctggccaggaccgcgcttcttcccggcg

SEQ ID NO: 598 - DNA, 84 bp, Homo sapiens
agggccacgcacttttctcatattcctttgccattggaagcattttgtggcctcgggttgggatacggcgcaccactgaacact

SEQ ID NO: 599 - DNA, 42 bp, Homo sapiens
aggcatttctacccggctgtggtaagcggaggttctcctctt

SEQ ID NO: 600 - DNA, 234 bp, Homo sapiens
ctgagggtttattggtcagggcccaggcagatgtcatgtgcccctgttgtccccacgcaggcccacagacatcacaggagaatgatttacaagccacttggggcctgctggcagtgagggtttacccaccccccgccccagcttgctccagtgccgccgtttacgtcatgggtacgtggcctgcagttcacggatctccaggcccatcctgttgactgcatacccagtgaggct

SEQ ID NO: 601 - DNA, 96 bp, Homo sapiens
catacacactgtacgccgcggacagtttgtagcggcactacggcctctgggtgccacattccctggacctattttccacctggcattggggtccga

SEQ ID NO: 602 - DNA, 24 bp, Homo sapiens
tacactgacagactgttggtttga

SEQ ID NO: 603 - DNA, 25 bp, Homo sapiens
tagatagcatccaggcgcccatccc

SEQ ID NO: 604 - DNA, 24 bp, Homo sapiens
acacagccccacggccaaacccca

SEQ ID NO: 605 - DNA, 24 bp, Homo sapiens
aggaagaagtcagacaccagcccc

SEQ ID NO: 606 - DNA, 158 bp, Homo sapiens
gatcgcaagtttccaggtggcagctcatctgaagtgccctatctggatgggagccagtgatggatatatgattgtctttaccagtggaccatacttgttactcttcagcatcactggcttcctgctgcaacgatttgaggaccatcaggcagccatca

SEQ ID NO: 607 - DNA, 54 bp, Homo sapiens
ggattcttggcgtctgtaccacgtccagattctggccacggacgcatatctcac

SEQ ID NO: 608 - DNA, 33 bp, Homo sapiens
agattggggagaactgtgaacacaaccagccca

SEQ ID NO: 609 - DNA, 78 bp, Homo sapiens
ctgacatggggtcgttgtagccagggcgaaacctcagcgccgagcccagctgctccaccggctctacactggcaggca

SEQ ID NO: 610 - DNA, 33 bp, Homo sapiens
ctcccttctcgcctcgaggaccggcaggccctg

SEQ ID NO: 611 - DNA, 30 bp, Homo sapiens
cttggactccggtagctcctctgggcccag

SEQ ID NO: 612 - DNA, 29 bp, Homo sapiens
tccaggacgtccagcaacccctggcagcc

SEQ ID NO: 613 - DNA, 91 bp, Homo sapiens
gccagtctgtaagctgtggctccagtgacccctacccaggtgatccgtagaacgtcgctggaagcattgaggatctgcagcctcgacacac

SEQ ID NO: 614 - DNA, 29 bp, Homo sapiens
tggaggacaaaaagcaggcggcaagtatt

SEQ ID NO: 615 - DNA, 56 bp, Homo sapiens
caaacctgtagcacctgaccgacgaatcagtgggcatgtgggcatcatcttcagca

SEQ ID NO: 616 - DNA, 43 bp, Homo sapiens
cagaagctgcaggcggacgaacatctgaccaaagaggtgtggt

SEQ ID NO: 617 - DNA, 85 bp, Homo sapiens
gagacgccgggtatccctgagtcgggaggccaagccatataacaggatcccggtagctttgtcaatggtggaacccagggtctgc

SEQ ID NO: 618 - DNA, 132 bp, Homo sapiens
actaactgcaagaactgggctgttactaaaacaggtgccaagaaccatggttccagcgtcccaggccataagattcccagtgacagggacctggtttcccaaggagcctcacagctcacatcattggagata

SEQ ID NO: 619 - DNA, 85 bp, Homo sapiens
gaggttgcaatgagtggaggttgcaatgagctgagattgcaccactgcactccagcctggccaacaagagcgaaactccatttaa

SEQ ID NO: 620 - DNA, 47 bp, Homo sapiens
gggccactgcacaccagcctgggggacagagtaagactccatctcac

SEQ ID NO: 621 - DNA, 72 bp, Homo sapiens
gcgagcagtgctggcgtgtgtgcaggtgcgagtcagtgtgactgtcccggtactgcactggcagactccaac

SEQ ID NO: 622 - DNA, 75 bp, Homo sapiens
tatggcctacttcccagccatcagcctctctttcaaggagtccgtggccttcaactttggcagccgtcctctgcg

SEQ ID NO: 623 - DNA, 193 bp, Homo sapiens
ataaatacatgttgcaggactgccctcactggctcactctgtggagtgagggacctaatgggccccatttacctattgcctctgaaagttaaagggcaggaacaaggtggagggccactgccctctggcctggcatggcccagaggcagcttggggttagctcaaggcagctaagcaggtccagcccaagaac

SEQ ID NO: 624 - DNA, 113 bp, Homo sapiens
cagtgaccgatccgaagatggctaccattcagatggtgactatggtgagcacgactataggcatgacatcagtgacgagagggagagcaagaccatcatgctgcgcggccttc

SEQ ID NO: 625 - DNA, 34 bp, Homo sapiens
atccagcacccgtcaagaccatgaccatctcttc

SEQ ID NO: 626 - DNA, 141 bp, Homo sapiens
cacctacgaggacgccggcaactacatcaaggtgcagttcctcgagctcaacatgcggcgcgacgtgaaggagatctattcccacatgacgtgcgccaccgacacgcagaacgtcaaatttgtcttcgacgctgtcaccga

SEQ ID NO: 627 - DNA, 130 bp, Homo sapiens
atcatccacgaggatggctactccgaggaggaatgccggcagtaccgggcggttgtctacagcaacaccatccagtccatcatggccattgtcaaagccatgggcaacctgcagatcgactttgccgacc

SEQ ID NO: 628 - DNA, 54 bp, Homo sapiens
ccaccgacaccaagaacgtgcagttcgtgtttgacgccgtcaccgatgtcatca

SEQ ID NO: 629 - DNA, 29 bp, Homo sapiens
tgtggaatggcgagaggagtgcaactggg

SEQ ID NO: 630 - DNA, 28 bp, Homo sapiens
ctgaaggtgatctcggtccccaagggca

SEQ ID NO: 631 - DNA, 71 bp, Homo sapiens
attcactggcggtgctgcgggcctcactggctgcctcatcgtcactggaacccgagtcagcttgggcactg

SEQ ID NO: 632 - DNA, 30 bp, Homo sapiens
gcctcctccaggcgatgtcggacaaaggcc

SEQ ID NO: 633 - DNA, 60 bp, Homo sapiens
ccactgcagcggtgtgacgtcatagttatgctgccccacggagaaagtaaacacgcgcac

SEQ ID NO: 634 - DNA, 87 bp, Homo sapiens
agtgccttggccactatgcgggtagactacgaccaggtgaagatcaaggacctgaagacctctaacaaccggctcctcaacaagagg

SEQ ID NO: 635 - DNA, 72 bp, Homo sapiens
aacaagaaacatggcgcgagaccggcatttcctttgtgacctcagtcacccgcctcatggaacgtcttcttg

SEQ ID NO: 636 - DNA, 81 bp, Homo sapiens
agcggaagctgtgtgcctatcctcggctggagatctaccaggaagaccagatccatttcatgtgcccactggcacggcagg

SEQ ID NO: 637 - DNA, 50 bp, Homo sapiens
ggacactgagttggagctggatggccagcaagtggtggtgccccagggcc

SEQ ID NO: 638 - DNA, 25 bp, Homo sapiens
tctctgaagtactaacacaaggaca

SEQ ID NO: 639 - DNA, 26 bp, Homo sapiens
tgcaccaggagagacagcgggtgcag

SEQ ID NO: 640 - DNA, 31 bp, Homo sapiens
tttttcactgtggcccgcgtggccgcgtaca

SEQ ID NO: 641 - DNA, 130 bp, Homo sapiens
ccaccatcatggtgtatgcaaccatcacctcccagctgctgcccactccagccaagtcccactacaccttcaacctgagggacctctccaaggtcttccaaggcatgctcatggctgacccggccaaggt

SEQ ID NO: 642 - DNA, 66 bp, Homo sapiens
ggggccagagctacccccatggagcaggaggccccctagcagccagcaaatggcccaggccgaggg

SEQ ID NO: 643 - DNA, 28 bp, Homo sapiens
tgagctgcctgtcgagctcaccggctag

SEQ ID NO: 644 - DNA, 81 bp, Homo sapiens
gagtgtgtctacatccatgacccaacggggctcaatgtgctaaagaagggctgtgccagctactgcaaccaaaccatcatg

SEQ ID NO: 645 - DNA, 101 bp, Homo sapiens
ggactggtaaggattgaggccgtaggatgggctcgagtgtggcggtgtccccagggccccagtgagcaagtgggtgtgctgggaacctggccacaagtgaa

SEQ ID NO: 646 - DNA, 86 bp, Homo sapiens
gatgaagacacagtcgccaaccttcagccacatgtcattgtaatggagctgctcaaagtagtggcaacctggttcaccattggaca

SEQ ID NO: 647 - DNA, 111 bp, Homo sapiens
aatcctggaagatatgcaagaggaagactatctgaatttcatcctgttcagtggagatgtgtccacatggaaagagcacttagtccaggccacgcccgagaacctccagga

SEQ ID NO: 648 - DNA, 76 bp, Homo sapiens
aacacttatccagaaccatccgtggaccgaagaggttaggacagcattccagtttgatacaggtttgccggcagaa

SEQ ID NO: 649 - DNA, 24 bp, Homo sapiens
gccgggccgcgtggcccagcacct

SEQ ID NO: 650 - DNA, 364 bp, Homo sapiens
gtctgcacggtcttgaactggtcgtagccacggccgcagcacatgagctcgcagccatccatgccctccgacgtcttgttgcacaggcggccctgcgtgcccagcgagccggtgctctcattgcgcacgcagtagtcagggctggggtcgatgtagaccaggtcttgtgtggtgggcgagttgaagcggctgttgacctgtaccaacttgccccggctgttgagccgcatggccgccgcgctgtcgtacttctccttcagggcatcacccaccttgcggaagtctgccagctgcagccagcatgtcttcaggctacatgagccggacaccccatggcacttgcaggccacatcagccaggttgt

SEQ ID NO: 651 - DNA, 138 bp, Homo sapiens
cagttttacttcacgcagggtggaaatttaatgagtcaggcccgtggggatgtagcaggaggcctggccatggacatagacaactgttcagtgatggctgtggactgtgaagacagacgatattgttttcagatcacc

SEQ ID NO: 652 - DNA, 99 bp, Homo sapiens
ttgccgcaaaattcgcagacgaagggcttgtagcccgcgtggatgcggatatgcgtgttgagcgtggagctgcggttgaacgctttgccgcactggttg

SEQ ID NO: 653 - DNA, 26 bp, Homo sapiens
cggggagcagcgcacccaacagcccc

SEQ ID NO: 654 - DNA, 91 bp, Homo sapiens
agaggcgggactagaacgtgggtagcttgaggtccggaccaacgtgctgtcccactgcatgacacgcaacacagacgacttggggtggcag

SEQ ID NO: 655 - DNA, 70 bp, Homo sapiens
gccacgactggaccttccacggcccgggcgccaccggccaggcggccgccaactggacggcgggcttcgg

SEQ ID NO: 656 - DNA, 94 bp, Homo sapiens
gcggcggtcgcgaagggcaaccgagggggccgtgaccaccgcctccccgcgacgccccagtccagtggcctcgcgtccgcccattcagcggaga

SEQ ID NO: 657 - DNA, 119 bp, Homo sapiens
agggagtcgctcaagtaaatcttgtatctgagagagttgcacagctgcactcctacaaattttttataccatgtccttttgacatattgtttgcccttacactctgagtaagagtctga

SEQ ID NO: 658 - DNA, 59 bp, Homo sapiens
ggagcggcggcaccgtagggagaaacggctgcgcctttggcgagcgctcttcgacggct

SEQ ID NO: 659 - DNA, 24 bp, Homo sapiens
ctaacagtctagaactatctcaag

SEQ ID NO: 660 - DNA, 165 bp, Homo sapiens
gcggcctcatgaccagcccgctcaacctgagctacttctacggcgcgtcgccgcccgccgccgccccgggcgcctgcgacgccagctgctcggtcttgggcccctcggcgcccggctcgcccggctccgactcctccgacttctcctctgcctcgtcggtgtcct

SEQ ID NO: 661 - DNA, 97 bp, Homo sapiens
atagtaaaattatcatttcccctgaagagaatgttacattaacttgcacagcagaaaaccaactggagagaacagtaaactccttgaatgtctctgc

SEQ ID NO: 662 - DNA, 24 bp, Homo sapiens
attaaggggttcctctacagcttt

SEQ ID NO: 663 - DNA, 34 bp, Homo sapiens
agcccagcaacagcgccgctaccaggggccacat

SEQ ID NO: 664 - DNA, 29 bp, Homo sapiens
gccttgagtaccttgcctccagtccagct

SEQ ID NO: 665 - DNA, 207 bp, Homo sapiens
ctggtctctgtctgaaagcagtgctctaccaagtcctggagatgaagggaattcactctgttttgcagaaaagattctgtggattaatacagaagcaccagcaacaccagaggggtggagactcctttctctcccgattctacagtctggctctaagcccagtaaaacagctcccgagcactgcttcagctgggtccagtcttgaca

SEQ ID NO: 666 - DNA, 203 bp, Homo sapiens
gcagctttgagactagtgcctatgtgtgttatttgtttccctgtttttttggtaggtcttatataaaacaaacattcctttgttctagtgttgtgaagggcctccctcttcctttatctgaagtggtgaatatagtaaatatacattctggttacactactgtaaacttgtatgtagggtgatgaccctctttgtcctaggtg

SEQ ID NO: 667 - DNA, 24 bp, Homo sapiens
catcttgtatcacagcagcaacac

SEQ ID NO: 668 - DNA, 78 bp, Homo sapiens
atctgcacatcgtgctgccacacgaggcttcattcgttatggctggcgctggggttggagaactgcagtgtttgtgac

SEQ ID NO: 669 - DNA, 749 bp, Homo sapiens
atgaatgattttgcctggtcccagttaattttgatttttcagccctttcatcttgatctcctccatcttgatcaccttggtggtgctcatcaagtactggatcacttagttctaatgctctaggagatactacagtatgattcttctcttggacaggaaatatatccacattgtccaaagcttcaaccatctgaacagaatccatttctgaaaatataatagattcatcattggaacaagtcaactgctggtgggtatcttgattctcatttacatttgattttttaattaggtcttcttgtagacacagagaatcactaaaatggtttgatgttacttctgaaggaaggggttctttcatttgcatatcaggtaattgttcttttactagatagtcatcactgaagctatcaaatagtaaactatcactcatattcaaacttgtttcaggaactggaagacattctccttctacaccagtgggagttctcttttgaggaatcagaagtataactggtttcacagtttcttgtgtttgataaccttgaagaaaactatttaattgtgaatcagtaacagaaacttcattcttttttaaaaaaagaccattttcctccaatagtattggagaatggaaaatcgggctttctggagtcaggatatcaaccccatgtgaatcactgctttgtttcatagtacctacagtcttaaggtccaaatgatctatcttagtcgctcctagagggtgc

SEQ ID NO: 670 - DNA, 336 bp, Homo sapiens
taagcattatggtggcctggccgctgcgctctcaaaagcagctggccctgagctccaggccgactgtgaccagatagtgaagagagagggcagactcctaccgggcaatgccaccatctccaaggcaggaaagctgccctaccaccacgtgatccatgcagtggggccccgctggagcggatatgaggccccgaggtgtgtgtacctattaaggagagctgtgcaactcagtctctgtctagccgaaaaatacaagtaccgatccatagccatcccagctattagttctggagtctttggctttcccttaggccgatgcgtggagaccattgtttc

SEQ ID NO: 671 - DNA, 94 bp, Homo sapiens
cccacgatgagctggttcccggaggggtccaaagccagctgggagaaatcccgggctccagggtaggtgaagttagagacccacggctgcaggt

SEQ ID NO: 672 - DNA, 50 bp, Homo sapiens
acttcagacggctcctgaagaaggaagagaagccgctcctgatcatgttt

SEQ ID NO: 673 - DNA, 81 bp, Homo sapiens
atgcggtcgggtacaccggtgctgtccatgcggctggccacgttcacggtattgccccagatgtcgtactgaggctttcgt

SEQ ID NO: 674 - DNA, 104 bp, Homo sapiens
ggcctccagctcaacgtagaactcggagaagttggcgatggaggcgaacatgaccgccacacactcacaggactgatagtagagctcatcattgcgccgctcgc

SEQ ID NO: 675 - DNA, 236 bp, Homo sapiens
ggtcgtcaccgctcagcggaggatcgtcgtcgtcgtcgctgcgccagcggctggccaggcgctgctgctgctgcggggtcaccgcccccccgggtttcttggtggagccgcgggcagagcccccgggggcatgggggtagccattcgcgcgggaatcggcctcgccccacgcagagcggtgttcggggcctccccggggcgccggcgccgcagtcttctgcgccgcgtagcccggg

SEQ ID NO: 676 - DNA, 24 bp, Homo sapiens
aagcccagggtagtctttctgcat

SEQ ID NO: 677 - DNA, 30 bp, Homo sapiens
gctgtggaccgctatcaccctctttatctt

SEQ ID NO: 678 - DNA, 29 bp, Homo sapiens
aatggccctgcggaagttctccatcagca

SEQ ID NO: 679 - DNA, 32 bp, Homo sapiens
cagagcctgggcggcacgccgagcggccgcat

SEQ ID NO: 680 - DNA, 37 bp, Homo sapiens
ggctgtcaccagagagcccgacggcttcaaggaacac

SEQ ID NO: 681 - DNA, 24 bp, Homo sapiens
cctgcaggcagtgctctctaacag

SEQ ID NO: 682 - DNA, 77 bp, Homo sapiens
gcctctgaaggcgtgatgctgggcttgttctccagccacctctttacatcaccaaaggactctagctcctgccgcag

SEQ ID NO: 683 - DNA, 24 bp, Homo sapiens
gcccgagccgtaagggaagccgtg

SEQ ID NO: 684 - DNA, 156 bp, Homo sapiens
ggcgcggcgagtgcatggggcgaggcgcggccgggagccgggagcccggaggcggcgggaggcggggggcgggcccgggccgcgatgcgcttcctgcccgcgccagccgcccccgaccccggcgcccgggcccgggtcagcctcgccgcgcagccc

SEQ ID NO: 685 - DNA, 62 bp, Homo sapiens
cttggagtagaaccagtggataaagatgtcattcgtaaacctcctcgcaactggaaagacag

SEQ ID NO: 686 - DNA, 98 bp, Homo sapiens
ctggctcctgcacgtgagagtccaatctcaagagcgggaatcggaagtctcccggtgtgacgtctctgggaagtacagttccgtgatgccggtggcgc

SEQ ID NO: 687 - DNA, 53 bp, Homo sapiens
tggtattttggcaacgcagacaaagaaaggagtggcccgtatggatttcatga

SEQ ID NO: 688 - DNA, 26 bp, Homo sapiens
cgcgatcgtgccaccgcagcgagacc

SEQ ID NO: 689 - DNA, 41 bp, Homo sapiens
ctgcagacagaaactatccaggccggagcagatgactttaa

SEQ ID NO: 690 - DNA, 95 bp, Homo sapiens
caaacagttggcagggtgtgagctggaacaaatggatgctcccattggcactggtctggacgacatccttgagacgatcagaattcagtgggaga

SEQ ID NO: 691 - DNA, 382 bp, Homo sapiens
gcggtggctaagaacatgcacattcttgaatgtcctctgcatggtgcctggccttctggatggtttcggacaaaactttatgtgctaggtgggagtgggaaaaggagtgggggaaggataaagccatctttggacacccactcccactgtggataaccacagcgtgtggccgaacaaagctgattagaacacagccctacctcgggaggctgccatctgccaggccctccttcccctcccagccttcaagaaatgttatctatgaaaggggaaaaatgccagccacatcctcattccaactctatccttaatgcagcttcacaaaattcctaaattctatcttgggtccttgaagagattggactatgacttgggtggcccc

SEQ ID NO: 692 - DNA, 58 bp, Homo sapiens
aatggacaccagaacggctactgcagagctgggctggacggccaatcctgcgtccggg

SEQ ID NO: 693 - DNA, 245 bp, Homo sapiens
cacctaactgcactgaaaccatttctaaccacaacccttggcccaaggacttggtacaggaagggagaagggcaggtgggcagggagcagacagggtctggctttgcccagagggcacgggctttcccacctctcaaagagacaaggaagccacctgtaagcagaagcagcatccaagtgcccctggcccccccatgtgttgattcaacccggttcctccccctctctcggtgggtgtgttgttt

SEQ ID NO: 694 - DNA, 80 bp, Homo sapiens
gaggctgcggtagcggccacgagttgttgaggaagccagactgcaggtacttggggggcgccaggtagccgtagccgtcg

SEQ ID NO: 695 - DNA, 138 bp, Homo sapiens
ttctgcacgctggagccgcagacccgcgccgcccggtcatagacgtggcagcggatcacagaactgcccacatccagccccagcacgaagccggggtaccgcggctcctgcgctctctgctccgggtccgtgagcagc

SEQ ID NO: 696 - DNA, 187 bp, Homo sapiens
ccgacaggggatttctgcccaaacttcatcaccaactctttctgagagcaaaaacatggggccgagtccggcagctgcacgcagaatccaactctctggcagctctcggcaccgacgagctccagatcccgcgttcgcatcccggcgctttgcgcgcagagctaagccttcggacccgtggactgca

SEQ ID NO: 697 - DNA, 89 bp, Homo sapiens
tcctttggtccagtcggaggctgcggagcggcgggggttgcctgcgctgtccgcccgggcatcctcccggtgatggaagcagccgccgc

SEQ ID NO: 698 - DNA, 24 bp, Homo sapiens
tcggcagacaggaaggcactccaa

SEQ ID NO: 699 - DNA, 139 bp, Homo sapiens
cgctcgggtgagtcccgagattgcggagctggagccgaggcttggctgacaaatcccgacccgactctgtgcctggcagtctaagggcttcggctctcacatcccccgagctggcctaaggcgctagtgctgggcgaaa

SEQ ID NO: 700 - DNA, 30 bp, Homo sapiens
tgattttgtattatcacctggaccccaacc

SEQ ID NO: 701 - DNA, 248 bp, Homo sapiens
cttttcttcaggagacagtgcgtagagaatgtgaagaacgctttgaactgacagaggctttgagtcaagccagagaacagctcctggagctcagtaagcttcgtggaagtttaccattctcaccgtgttccctcagcaagggcagcctaacctcccctgctgcagcagtcagtaatcatggagagagaagccttgcaagactgaactctgaaaaaggaatccaaattcccaacctgcgcggggtgtca

SEQ ID NO: 702 - DNA, 332 bp, Homo sapiens
gatgaccgctctccggcccgggaaccgggggacgtaagcgccaggacccgcagcggcggcggcgggggcaggagcgccaccaccgccatgccgcccccggtgcccaacggcaacctccaccagcacgacccccaggacctcaggcacaatggcaacgtggtggtggctggccggccgagctgttcccggggcccccgccgggcgatccaaaagccccagccggctgggggccggcgcagtggccgcggcccggcggctggggggctctgccttcagcccccagacggcgggacgtgcgtccccgaagagcccccggtgccacctatggattg

SEQ ID NO: 703 - DNA, 84 bp, Homo sapiens
cccgccggtggatgctccgcgcctgccctccgcagcctcgctcagcagtcctgcgttggggtctgcgccctaggatgcactgag

SEQ ID NO: 704 - DNA, 65 bp, Homo sapiens
ttcattggctttagtatttgctcttcaccactacaagcccactcccctttacttcatggatgaga

SEQ ID NO: 705 - DNA, 29 bp, Homo sapiens
gtttcatggggatagtcttcgctcttcat

SEQ ID NO: 706 - DNA, 39 bp, Homo sapiens
gaagttgatgggggtagttcccaataagacatcttcctg

SEQ ID NO: 707 - DNA, 57 bp, Homo sapiens
aggcacagggagaggataggacccgcgagagaaagcctgagcgcgcgctgagaccca

SEQ ID NO: 708 - DNA, 142 bp, Homo sapiens
gtgcggccgcggagcctaggccaggggcctggcgctcagggcgtggggcgcgcggggagggagaggggtcggcccagcacagcgtccgggagcgctagggccggagcagcgctgcccgccgccgtgcgtccgcgggaaggac

SEQ ID NO: 709 - DNA, 66 bp, Homo sapiens
tccccgggagttcaactctgtctccgtataaggttcctcagacgttctcagaggacgagctagagg

SEQ ID NO: 710 - DNA, 104 bp, Homo sapiens
tcgtggcgaccacaagtcctatcacgccacaagaatctcggcttgttcacctacaaatgaaggccgacgatacttgcagaccgagtctgacatctatgggaccc

SEQ ID NO: 711 - DNA, 75 bp, Homo sapiens
tagagaaggccgaggctcgacttaaggcaaagcaggagaagcgctcagagaaggacacgctcaagaccagcaacc

SEQ ID NO: 712 - DNA, 166 bp, Homo sapiens
gacatggactggtctctcagacccctgggccaccatgtaggccaccactccaggccgtggacttcccccaacttggggacagccttattcccaaatgtctctatccttttgactggagcatcttctgcacaaccttgggagcccatccaagggttggtgaggactg

SEQ ID NO: 713 - DNA, 182 bp, Homo sapiens
tacagaggcctgcattcgagtggctggaaaaatcctggagtccctggaccgaggggtgagcccctgtgaggacttttaccagttctcctgtgggggctggattcggaggaaccccctgcccgatgggcgttctcgctggaacaccttcaacagcctctgggaccaaaaccaggccatactga

SEQ ID NO: 714 - DNA, 84 bp, Homo sapiens
ttccagactgccaagacccggaagatgaaggcactgaaggtggcagcgaagaagccccgccagtagttccgcactgcaaagaag

SEQ ID NO: 715 - DNA, 25 bp, Homo sapiens
gcaagggtctgaggcgtccccattg

SEQ ID NO: 716 - DNA, 233 bp, Homo sapiens
accgcggagagttctgcgaggcctgccaggagggcatcgtgcactggaagcccagcgagaagctgctggaggaggaggcgaccacctacaccttctcccgggcgcccagccccaccaagtcgcaggaccagacgggctcaggctggaacttctgctctatcccctggtgcttgttttgggccacggtcctgctgctgatcatctacctgcagttctctttccgtagctccgta

SEQ ID NO: 717 - DNA, 62 bp, Homo sapiens
ctttcttcttcagcggggcataagccttctggcaggtgctgtggtcaacaatcgggatttca

SEQ ID NO: 718 - DNA, 102 bp, Homo sapiens
aaacttccggcaagtgtccacaacatgctccatctgcaggtacatagccgtggccatcacagccatgatgttgccctcccgcaaattgagccgagatgtgta

SEQ ID NO: 719 - DNA, 24 bp, Homo sapiens
tgagaggcggaggccgtgcctggc

SEQ ID NO: 720 - DNA, 25 bp, Homo sapiens
aaggcacgggttgcttgcaatgtgc

SEQ ID NO: 721 - DNA, 54 bp, Homo sapiens
aggtagagccggaggaaccgcaattgtgatgacgtcaagggctttcctcaccac

SEQ ID NO: 722 - DNA, 31 bp, Homo sapiens
aattcctcgtccccggtggctgctaccccag

SEQ ID NO: 723 - DNA, 459 bp, Homo sapiens
gatttcggtggaactgcagctccgtcagggcgcccaggctgttcaacagccccgaatccagagacacaaggcggttcgagtggagcagaagtctctcgagcttagcctgtgctccaagcaaccccttgggcaggtgggtcaggttgtttcccgataaatccaacaacttcaggttctccagattcgtgaagagactggcaggaaggaaatcgagctgattctggttcagagcgagctcctgcaggttaaccagtttctgaaacatgttttggtcaatgccccttagcgcattgtggtccaaaaacaactgctccaggagcaccatcttatccagcagcgcacctggaagatgcgtgattttgttgcgcgacagcctcagggttttcagttttatcaggtcactgaaggtgccgggggcaacggcggaaatgtggctgtcggagatcatgaggcgctgca

SEQ ID NO: 724 - DNA, 110 bp, Homo sapiens
agcgcagccgcagcgcgcccaagcttggctccatcaccgaggacctgctcggcgaacagctggagcaggagctgcaggaggaagaggaagaggagcaacccgagggctgc

SEQ ID NO: 725 - DNA, 74 bp, Homo sapiens
ggccgcgctgggacgcagacggctacggcgggcgcacggccgcgactagcgttgcgcggagctgcgaagggcgc

SEQ ID NO: 726 - DNA, 58 bp, Homo sapiens
aatggaggtttcctcctcctgcggctgagtgtggcttccccggaagacctcactgacc

SEQ ID NO: 727 - DNA, 26 bp, Homo sapiens
aatcgtaagtcccgtcgtccctgctg

SEQ ID NO: 728 - DNA, 297 bp, Homo sapiens
ccccacgctaatcacccttttctctcctcagccccaccccactaccccaccaggaaagaaaacaccgatacacccgttgctctgcttctcatcagcctgagctgagtggcgggagggatgggaggagacatgggggaatgggaacaggtcacactggaaatgggtgggccaccctcctagccgggttcctgggtcctctcctccctccccaggggctgcccctgtcccaccagagctttgggctgctgggaagaatggggaagaaagggccccagagggagcgaccttggggctgta

SEQ ID NO: 729 - DNA, 24 bp, Homo sapiens
gctgttgatgacatgaacgaccac

SEQ ID NO: 730 - DNA, 348 bp, Homo sapiens
gtccacatgacaccaggctctgaggcctctgaggccgaaaagccactgaggagcagatattggaatgtctcttcaaggatctgataactttcttgttttccaagtctaggattttgattgccccagagtcgtcagcagaagccagcaggttttccgtttgattcaatgaaagacaattgatttcttcttcattcacatgaaaatggtccaaggaatctttgagggacctgacatccagtacactaatggtttctccatgtgaggcatagagcttggtgggacaggagggagaaaataagacactggtaacatcatcagccccttggaaccgcgtgtgtcctaatggag

SEQ ID NO: 731 - DNA, 83 bp, Homo sapiens
ccttaaagcctgcgtcccagtctgtgcgaatgattcggtcatccagacgcgtcccatttatgtaccgcatggcgttttccgca

SEQ ID NO: 732 - DNA, 164 bp, Homo sapiens
aacgtctgtcagagtcgcggcctatccgacgtgcggcgcagctcacggccttcgcactgctgcaggcccagctgcggggccaggacgcggcccgccgcctgcaggacctcgcggctgggcccgtgggctccctgtgccgccgcgctgagcgatttagagacgcc

SEQ ID NO: 733 - DNA, 42 bp, Homo sapiens
gagcctgctgactgcgatgaggacgagctgggcgaaatcctg

SEQ ID NO: 734 - DNA, 78 bp, Homo sapiens
ggttggtgaagagccgctctgtcccaccccgcagaatgtccaggaagccgccatacggctggtcgtactccgccagcg

SEQ ID NO: 735 - DNA, 43 bp, Homo sapiens
cgccggccagcacgtcagaggagccgcacgtcttcctgcagac

SEQ ID NO: 736 - DNA, 107 bp, Homo sapiens
ggtctacgtcacgcgctacctggacaacgggctctgcagccccgacggcgagtggcggcgcctgggccggcccgtcttccccacggcagagcagttccggcgcatgc

SEQ ID NO: 737 - DNA, 38 bp, Homo sapiens
ctggtccggctgatgggggtttgctcagcactgtgcca

SEQ ID NO: 738 - DNA, 34 bp, Homo sapiens
cccaggggtccgagtcgaggctggcgagctggat

SEQ ID NO: 739 - DNA, 78 bp, Homo sapiens
tgctccatagaccaccgcgtacaccaccttcttggtttgctctctgtctgcgtgtgtcacctgttccacgggcacatc

SEQ ID NO: 740 - DNA, 29 bp, Homo sapiens
ccggcggtggcgcctgcggacctaactag

SEQ ID NO: 741 - DNA, 151 bp, Homo sapiens
cgtccactagggacggcgcggcgtccccctccagcgcggccaggcgggcgcggaggcgagcgatgagggcgtcgcgggcagcgagctggtcctgcaggcggcgcagccgctgtccggcctcgtggtacagggtgcagagcgcggcagctgc

SEQ ID NO: 742 - DNA, 36 bp, Homo sapiens
tccactggcatcccgatggcggtggcaaaccagtcc

SEQ ID NO: 743 - DNA, 93 bp, Homo sapiens
cctgagggcccgtgcgcgagacaccccgggcagtcccacgtcgtggcgcgtcttccggcccaggatctggaacttctgcctgttaactttcac

SEQ ID NO: 744 - DNA, 75 bp, Homo sapiens
ttctctcacctgctgaaggtgattaacatttgtgcccacgtcctggatgacgtggctcctggacccgcaataaag

SEQ ID NO: 745 - DNA, 73 bp, Homo sapiens
gggacccatggcagccgagacctcccagtcaacagaatcatcgatgtggatcttgtaactggctcggcgcccg

SEQ ID NO: 746 - DNA, 424 bp, Homo sapiens
gtcacttggacgtcagcgccagcagccggctcaccgcatggccagagcaatcctcgtcgtcagccagcacgtcacaggaggggcctagaccagcagctgcccaggccgccggggaagccatggtgggtgcctcaaggccaccccccaagccgctgcgtccgcggcagctgcaggaggttggccgccagagctcctcggacagcggcatcgccactggcagccactcctcttactccagcagcctctcgtcctacgcgggcagcagcctggacgtgtggcgggccacagatgaactgggctcactgctcagcctgccagcagcgggggcccccgagcccagcctgtgcacctgcctgcccgggacagtcgagtaccaggtgcccacctccctgcgggcccactatgacacaccacgcagcctttg

SEQ ID NO: 747 - DNA, 185 bp, Homo sapiens
ttccgagtgcctccgcttcctcttccctgcgcccacgtgtgcctcttcctcactggcgctgtccttgcgctgcttcttcttcttgctcctcttccctgcagagccattggcctcagggacttcctccccaccagcctcaaggtcagcctcctgtccctttttgcgcttcttaggcttctgattcc

SEQ ID NO: 748 - DNA, 80 bp, Homo sapiens
tcctcacctgcgtcgtcttcctggttgtctacaaggtgtacaagtatgaccgcgcctgccccgatgggttcgtcctcaag

SEQ ID NO: 749 - DNA, 356 bp, Homo sapiens
aatgaaagagtgggtcctgtcagcactacgtaaaatatatatcttaagagcattaatttctttttaaatgaaagacagtgaagaaagtctgtgttagaaaaaggcataatagaagcttggttaaatgtaagcaggtttctatcaagaaagaataaaagtaccattactccattaaaccagtaataaaaacatactattgtgcaagttctcaaaatagttgttcataaaagtgaagcttgttagtccttttcttctttttagtgaccaaatcaacatgctgtgtatctaaccatcctggcaagacatgagtcaagggaatgagaagcatggttgctaactctatgctcaaaggaggt

SEQ ID NO: 750 - DNA, 25 bp, Homo sapiens
ccaacctgatgcacagcatctggga

SEQ ID NO: 751 - DNA, 25 bp, Homo sapiens
tgtgcacaacaaccggggagatggc

SEQ ID NO: 752 - DNA, 36 bp, Homo sapiens
ctggctgcttgtcgacacgccggatgccagatggag

SEQ ID NO: 753 - DNA, 30 bp, Homo sapiens
tcgccgtcggctctgccaatcggtgagtcc

SEQ ID NO: 754 - DNA, 35 bp, Homo sapiens
caggaggagcgatcacgtctaccagggcaactgca

SEQ ID NO: 755 - DNA, 36 bp, Homo sapiens
agtgtggggcggtgaagacgtccacttcttcaggaa

SEQ ID NO: 756 - DNA, 25 bp, Homo sapiens
ttaccacttatttcctcatatgaat

SEQ ID NO: 757 - DNA, 37 bp, Homo sapiens
gtgtatattgatctcactgatgcactgtggaagtaac

SEQ ID NO: 758 - DNA, 51 bp, Homo sapiens
ctctgtcatcaggaccctccgtccacgtcccctgtgcggccagcgtcagag

SEQ ID NO: 759 - DNA, 28 bp, Homo sapiens
tgtttgagtgcgccgtccgaactgccgt

SEQ ID NO: 760 - DNA, 398 bp, Homo sapiens
aaaggttgcttgtgacaggtccagccaagaagacagtgaaactaactcacgcatcattcattccaaggacgcagcgttagttcactaggaggggtggggccacactcttctctgtgtgtgtgtgaagttaagtaatgttcacaatatttacaataagaaaaagaccttccactgcgcatgatgtaacttacagcaaaaaaaattattcatgcttcttttcatatcacatgatggtggcaagacgagagaacatgcttgtctaacactgcttggttaagggtaaattctctgaagacaaagcatcagcaactggatggaaggtcggatggcggagttcattttctttagtgtagctagtcaatcttcaggtaaatagccgagtccttttgcatgtgcag

SEQ ID NO: 761 - DNA, 117 bp, Homo sapiens
tgggattccgagcgcagcgactccctctctcctcctcgccacggcagagatgattccttcgacagcctggattcctttggctctcgctctcggcagacgccttcaccagatgtagtc

SEQ ID NO: 762 - DNA, 24 bp, Homo sapiens
aacaggtccaaagctggtgacata

SEQ ID NO: 763 - DNA, 51 bp, Homo sapiens
ggaagcgcaggagggcgaaactgaccccggcggacagagcgatcgcgggta

SEQ ID NO: 764 - DNA, 35 bp, Homo sapiens
ggctttcgttttgacggctgcacacggcccgtgtt

SEQ ID NO: 765 - DNA, 82 bp, Homo sapiens
ttcctcactggagtacacggtggtgtctgtgtcatcggagtgatatccggactggtagccgcttgtctggtttgagccttca

SEQ ID NO: 766 - DNA, 163 bp, Homo sapiens
agtagatgagacttctccaagctgcttcacaagcaaactaaccgaaaaaccgaaaatatacaaacagcttcacacacacacacacacacacacacacacacacacacacacaaaggaagatcatcaatggctgcggtagcctagtaggaatggactatataat

SEQ ID NO: 767 - DNA, 93 bp, Homo sapiens
gcggcagtagagaaaagtaatcgaaagccaagcacggcagactatcatgggggtagccttctctttgggggctactttctgggtgccatattt

SEQ ID NO: 768 - DNA, 209 bp, Homo sapiens
cactgaaagtatgccgaggttacgtctctcctggttattcaggtttgatgttcaggctgggacttctgagagtctcatggaactttctcgtcactatcttctcgtccctgacctctctcctagccaagcaagcttcttcaccaagataggataagagagatgtggctgagagaagacggggaagagaaaagggaccctgagtcttctca

SEQ ID NO: 769 - DNA, 36 bp, Homo sapiens
tccagacccgtgtccaggaacctataaataccttga

SEQ ID NO: 770 - DNA, 127 bp, Homo sapiens
agaggctccacagtagtgacggcctttccattgcatgctggcctgccatggccatgccccctccagggagctttttccattcacaattttgttgccagttatgatactgttggctacttgtctccca

SEQ ID NO: 771 - DNA, 978 bp, Homo sapiens
gctagggcctcgaggatgtcgctatatatttttataactaaatgataaatttatattcaaattgtttgaatacgtttccaaaactttcagagtacaagtcattgttaagtttgcctttactttaaaaactaaaagaatacatttctatataaactagcagtcaggaatttgcctgttttctagcttcttcatctatctaaaatatatatttagctaccagaattatggtactcctaataaaatacttaataaatagcatataaaatcaaagtttaaaagtaaatgatggcagtttgccatactaaaaagataaagaatgtctaaaattataggaagataagatattagccctcatagaacttaaacttttagaaattctgaataaggaaatatattctacatagataaggtgtgaaacactcagctttctaaagtgaaataattaaatagtatcccacaatcaagagtaaggaaattctctaacatattccccaagaaacattaaaatatttcctatttcttataaaagtgaagataacagtgtatttccatcaacagaattcttatgaaacatcatttccacattaaatccacagccttctcagttaatatcttaaggaatatttcttggaaatataatagtcacctacaattcaagacactttgaaagattaacagccagtgattcctggctcacactatagtcaattgccaaaacttcaatagcatagcagataaaataacagcaaatagcagaggtactatgctaaacacttcattagctgagctgaaagcttaagcggcaaacataggttttcctcacactcttcaaagtgaggaatccaggaagaaagctaactactggaaaaacaaataaacaaacaacaacaaaatctttccttcttgtcttccctgggttcagagacctccagaaaacttctctgctgaagactgggaaacttttccatgcgtgctcat

SEQ ID NO: 772 - DNA, 32 bp, Homo sapiens
tgtgaaaatccttgaacccacccaaatacctg

SEQ ID NO: 773 - DNA, 102 bp, Homo sapiens
actcccttgctgatagtttctcccatacatgcattccaccatgtctttgatctgctgaggatccagtcttttcagaaactgatttttattaagggcatctgt

SEQ ID NO: 774 - DNA, 38 bp, Homo sapiens
ttcgaccaaactcatacctttctaccaaaatccttgag

SEQ ID NO: 775 - DNA, 55 bp, Homo sapiens
attccaaccgtaacttctcctccacatcaggagggatggatccatatttgcaaat

SEQ ID NO: 776 - DNA, 61 bp, Homo sapiens
ggaggatgaggaaccgcgggtccgtggccaggttggcgtcaatggtgacggacaggaacga

SEQ ID NO: 777 - DNA, 70 bp, Homo sapiens
gtccgagtccgtgttgaggtgctggaaagcgagtgcgccgagcacaaagcccgagagcaccgccgacgta

SEQ ID NO: 778 - DNA, 25 bp, Homo sapiens
tccgcaggggaaacaaaactgcaca

SEQ ID NO: 779 - DNA, 27 bp, Homo sapiens
ttgatacacaccaaccaggctgaaagt

SEQ ID NO: 780 - DNA, 25 bp, Homo sapiens
caccagcagactgtgagtctttgtg

SEQ ID NO: 781 - DNA, 30 bp, Homo sapiens
gaacccccttctctcgcaggatcaatctcc

SEQ ID NO: 782 - DNA, 25 bp, Homo sapiens
gattttaggtgtcgatgaatacggc

SEQ ID NO: 783 - DNA, 95 bp, Homo sapiens
gccaataaagtgcccccatcgtgtgcccttgctgatccactatctcgctgcgactacggcggtagaattcagtttctgttttgacacactgggcc

SEQ ID NO: 784 - DNA, 102 bp, Homo sapiens
ccgggatgatttcagactcgttcaccaaggaagacttgatgtcagctaaatcgccttcctcttcgggatgactgatctcggcgaagatcttttccttctgag

SEQ ID NO: 785 - DNA, 193 bp, Homo sapiens
agtcttgaggtgatccagggtatcaggcagcagatgaatggaaggggcccctttggcggattcgagagcggcgatcctcgcctggaggtcgttggttttcacacccaggtacaggcaagacaccacggccaccactgacaggagggccgccaggacggcacacgggggcatggtccgggcacaatgctgttcg

SEQ ID NO: 786 - DNA, 24 bp, Homo sapiens
taaaaatatccagtgagatttgct

SEQ ID NO: 787 - DNA, 28 bp, Homo sapiens
aggttccagaccagagtattattgctaa

SEQ ID NO: 788 - DNA, 365 bp, Homo sapiens
ttcgactgccggacttcgtcaacccagtccactacgacctgcacgtgaagcccctgttggaggaggacacctacacgggcaccgtgagcatctccatcaacctgagcgctcccacccggtacctgtggctgcacctccgggagaccaggatcacccggctcccggagctgaagaggccctctggggaccaggtgcaagtccggaggtgtttcgagtacaaaaagcaggagtacgtggtggtcgaggcggaggaagagcttacccccagcagtggagatggcctgtatctcctgaccatggagttcgccggctggctgaacggctccctcgtgggattttatagaaccacctacacggagaacgga

SEQ ID NO: 789 - DNA, 78 bp, Homo sapiens
agtccttggctactgccccgccgagcccccgtagccgccgctgcccgctccgggtcgcgctctaggcgcggagtttcc

SEQ ID NO: 790 - DNA, 112 bp, Homo sapiens
tttggcaaatacgtgtagacctacatttattaaatcatgatggaaatattattgatgctgccagcattgctgcaatcgtggccttatgtcatttccgaagacctgatgtctc

SEQ ID NO: 791 - DNA, 540 bp, Homo sapiens
cgttgctgagctctagggccgtaagcaccgggtcctcgctggacaatgagaggtaagccgggctggccagccccttgtaggcattgatcctcgagcgtgagtggctgaaggagtcgtgcctctgcttctccatgcagtccccgcacttgcagaaatagtcgtgcggccgctcgatcctggcacccttcatcagcagcatgtgcaccacttcgtatttctggcagtgcgccgccaggatgatgggggtgatgtccggcgagaagcgcgtgccgtcctcgtcgtaagcgtagaagtcgtcgtcctgcagctcctgctcacaggggctcagagtgagacgcttgctggccgcgaagccagggtggttgaggatggcctctacgatgcgcacgtagcccttgctgatggcgagcagcagggcgtcgccaatgcgcgccaggttctccttcttgagcagcagctcggtcacctccaggtgctcgttgcccacagccagctgcagcgcgttctggcccatgtagtccacgcagttgacgttcagcg

SEQ ID NO: 792 - DNA, 25 bp, Homo sapiens
ttttgctacttgtctgggtctggtg

SEQ ID NO: 793 - DNA, 24 bp, Homo sapiens
gttggaactccaacacacacttga

SEQ ID NO: 794 - DNA, 175 bp, Homo sapiens
cctggaccgtgtcgtagaggccgatcctgagagaggcggagctgatttgccgctgaagccccgcaggcagcccgctgtagagtttcatccgcccttctgtttttaccacagcggtgattgttcccaggacacctttatacctaataacactggacgtcgggcattcaccttggac

SEQ ID NO: 795 - DNA, 117 bp, Homo sapiens
ggagccggactttggccgtgtccagcgggaaggtgatcacgtccgccaagcacgccgctattccagctgagaagagctggacccccagggtcgggtgtacgtccgaggctgtcaggc

SEQ ID NO: 796 - DNA, 108 bp, Homo sapiens
ggtccgtctctcgccgtctacctgttgcagcgcttgccaccgccacgaaacccctgctgcggagcccccctaaatccaaccacatccaggccagcgagtgccgctctc

SEQ ID NO: 797 - DNA, 43 bp, Homo sapiens
cgacgggaacgagcgcgatcaccagggcgaagactagggctgc

SEQ ID NO: 798 - DNA, 49 bp, Homo sapiens
ggccagttcaaaagtcgttttggcatacggggacgctctccggggcagc

SEQ ID NO: 799 - DNA, 967 bp, Homo sapiens
accgctttcggaatcaatggcaaaagatggtccacactctgcggtgtggaccatctttgattgcagggagccgagattgcagggagccgagagttggactacagtgtagcgcagccaggcgtgatcactgcctgcctcgtcggcatcggaggcgctgacccacatgactacagtgccaggggccgcggcctcggacactgaggccttgtaatgctgttggctgaagagaggtggttggtcattgaggtcagcgacccggagtagcagcgtctcctccgtgctcagcggcggggaccccgcgtccgtggccaccagtagtaactcatacagatcgcggctctctctgtccaggggcccctccacgcaaaggaaaaatacccctggggggccgccgggtagcaacgcgaagtctccctctccgccttccaaggacagagagatgctcccgtctccaagacccacaccaagctcccctgtggcctcatcttccttctcccagtcaccgtccgcgtcagacaccgagacgcgagccacgtagtcgcccggtcgggcgccttcagagacacgggcgacgcctccctctgtgagaaagagcacgtgaattgctggccggttgtcattcacgtccagcacggcgatggacacgcgcaccgtggcaacctcaggctcggcgcctccatcgcgggcctccaccaccaactggtgccaggcctgtgcctcgcggtccagaggtctccacactcgcaccacgccgctcagctcctccaccgcgaagtaggccgcgtcgcccagtgccccgccgccgctacccgccccaggcacttgccgggcgcggacgctgtagcgcacgaagccattgggccccaggtcgcggtcggtggcgcgcacgcgacagacctcggcgcccggctgggcgtcctcgcgcaccgcggcgcggtactcgtcctgctcaaagaccggcgggttg

SEQ ID NO: 800 - DNA, 75 bp, Homo sapiens
gaaaggagggcaggtatcgagagcccccgcccacccctcccggctacattggaattcccattactgactttccag

SEQ ID NO: 801 - DNA, 32 bp, Homo sapiens
gcggctcgcgctcggccgcggagtcctggcag

SEQ ID NO: 802 - DNA, 24 bp, Homo sapiens
agagacgggtactggagaaaatca

SEQ ID NO: 803 - DNA, 24 bp, Homo sapiens
agttcaacagattctgacagtgaa

SEQ ID NO: 804 - DNA, 48 bp, Homo sapiens
ttctggttcgttcttcttctttgagcctgttggcctgccagggccctt

SEQ ID NO: 805 - DNA, 39 bp, Homo sapiens
gtcttgctgaggtagctcgtgctggtgttcatgcactgc

SEQ ID NO: 806 - DNA, 31 bp, Homo sapiens
tcccgtggcatgcattgagtctttctccact

SEQ ID NO: 807 - DNA, 35 bp, Homo sapiens
gaaaggtttgggccgaatattatgcttgtgttcaa

SEQ ID NO: 808 - DNA, 66 bp, Homo sapiens
taccagtgacttctccgagtcgggagctagaaagaggcttccggccaggttcccttggaacaggtg

SEQ ID NO: 809 - DNA, 26 bp, Homo sapiens
cccgagcagggaccgggcctgccggg

SEQ ID NO: 810 - DNA, 61 bp, Homo sapiens
cagcaaacatccaggcggcggcagcagctctcaaggtacacttgtcctgtgagccgcagag

SEQ ID NO: 811 - DNA, 175 bp, Homo sapiens
acctgggctgctttgtatccgacccgcttgggtacccgcttgtgtttcctttgtctgtgggtccgtatcactttgctcccttctggaattccacttagatgagcgtcggccctttcatccctctccctccgtctctgtaccttttcacatctctccgtgtatgtttgctctattc

SEQ ID NO: 812 - DNA, 27 bp, Homo sapiens
agatgatgctatcctggggaggctgct

SEQ ID NO: 813 - DNA, 81 bp, Homo sapiens
gtggatgtcggcaccctggagccattgctttctccacacgtggtctctgagctgcttgacacgtacatgtccacgctcact

SEQ ID NO: 814 - DNA, 80 bp, Homo sapiens
acttcaaacaagtgtgaagaggctgtgtggcgagattgtggaactgaagcagcacctggagcactacgacaagatccagg

SEQ ID NO: 815 - DNA, 155 bp, Homo sapiens
ctgcgtgcttgtagccggacacatagcctgactcgtccaccagatccacgcggccagccttgcccttgcccttgccagaggggtcgaagcgctccttgtgggagcccgtgaacttggtggtgtccgtgagcctcgacactgtgggcgacgagatg

SEQ ID NO: 816 - DNA, 86 bp, Homo sapiens
accatctatgaggtcgtggatgcctcggtcaaccactcctcgggcagcagcaagaccctccgtgtgaagctaaccgtcagccctga

SEQ ID NO: 817 - DNA, 27 bp, Homo sapiens
ccagggcagatgtgccactgacttcaa

SEQ ID NO: 818 - DNA, 50 bp, Homo sapiens
gcctgggctttgcacgcgagtcctggcgccgagagcgttccgcgaagcct

SEQ ID NO: 819 - DNA, 30 bp, Homo sapiens
gaaacaaaaaccggcacatgcggttactgt

SEQ ID NO: 820 - DNA, 104 bp, Homo sapiens
tcctgagataatgaagccgttcattcttgggcacaaaagttcgaatggaggcctttccccgccatccgcataagacgatgggacactgcagagcgtctggattc

SEQ ID NO: 821 - DNA, 67 bp, Homo sapiens
caagccctttgcacacctacatcacagggacagcatgaccacagagaacggcaagatcagcaccacg

SEQ ID NO: 822 - DNA, 122 bp, Homo sapiens
gtggatgacagtcgcatcgtgggattgctgctggtaccgctggcagtaagtatagacgagcagggtgaggaggcagccgaggatggagctgctcagccccacggcgatcatgtggaacatgt

SEQ ID NO: 823 - DNA, 25 bp, Homo sapiens
agatctgtaactggctccctgtttc

SEQ ID NO: 824 - DNA, 60 bp, Homo sapiens
tttgactttgggactatttgctaggaggtggcgaagtttcacataactcttccacagttt

SEQ ID NO: 825 - DNA, 24 bp, Homo sapiens
ggagtttggagatggatcggatga

SEQ ID NO: 826 - DNA, 81 bp, Homo sapiens
taaagacagtgatgaggccgaggacgctgagctctatgatgacctttactgcccagcatgtgacaaatcgttcaagacaga

SEQ ID NO: 827 - DNA, 24 bp, Homo sapiens
cttgggcttgccgctgttctctct

SEQ ID NO: 828 - DNA, 26 bp, Homo sapiens
tccttgggccttcgggatggagccct

SEQ ID NO: 829 - DNA, 24 bp, Homo sapiens
tctctgttcctcccgatgggagga

SEQ ID NO: 830 - DNA, 25 bp, Homo sapiens
tagacatccttatcagcacagcact

SEQ ID NO: 831 - DNA, 54 bp, Homo sapiens
ccggcccgctacgccaatgtgccccccgggggcttcgagcccctgcctgtcgcg

SEQ ID NO: 832 - DNA, 365 bp, Homo sapiens
ctcatgggcaaggttctaacacgcaggagcgctttcttccttcatactgaatttactccagtactaggctgttaggaagtgacagtttcttctgtgtcttgcaatgccaagggaggaactgaattctgaattgattcttcatctgggtcacaagggaaaccagcatagtgaaagagtcacttgatctcttttttgcaattccatagtaacagctttaaaggtttctgacactcgaagagcgcaggtagagagagagaaaaagaaaatgaccgggaggtactgtaacacgggagagctgtcaaggaagttccatttcagggcaagcacaggaaaacactcctctccgtggagcaaagaagtcagcc

SEQ ID NO: 833 - DNA, 117 bp, Homo sapiens
tagatcccataatagatcacgttcaagacagaaagacagacgtagatctaagagcccacataaaaaacgctctaaatcaagggagagacggaagtcaaggagtcgttcgcattcacg

SEQ ID NO: 834 - DNA, 25 bp, Homo sapiens
ttgaccacatattatcccctccacc

SEQ ID NO: 835 - DNA, 28 bp, Homo sapiens
tgccaatatcttatcatctccctctaag

SEQ ID NO: 836 - DNA, 33 bp, Homo sapiens
actgaaaagccatcgactccagtccagacaaga

SEQ ID NO: 837 - DNA, 117 bp, Homo sapiens
tgtgggccgtcctgaggttagccctgcggccgtgtgcccgcgcctctcccgccgggccgcgcgcctatcacggggactcggtggcctcgctgggcacccagccggacttgggctctg

SEQ ID NO: 838 - DNA, 24 bp, Homo sapiens
tcagccgtcgcaccttccagccac

SEQ ID NO: 839 - DNA, 26 bp, Homo sapiens
ttttgatatggtgtccttagttttta

SEQ ID NO: 840 - DNA, 31 bp, Homo sapiens
ataattgatgtgatccggaaccagccaggga

SEQ ID NO: 841 - DNA, 151 bp, Homo sapiens
cagagactctcactgcacgccggagggcgcccttcctcgctcgcgcccgcgcgaccgcgcgccccagtcccgccccgccccgctaaccgccccagacacagcgctcgccgagggtcgcttggaccctgatcttacccgtgggcaccctgcg

SEQ ID NO: 842 - DNA, 97 bp, Homo sapiens
cgtgccaacgccatcgagaaatgggtggcagtggcggacatctgccgatgcctgcacaactacaacggcgtgctggagatcacctcggccttaaaca

SEQ ID NO: 843 - DNA, 31 bp, Homo sapiens
gcgaatggtcacagttggtcgctgggcaaag

SEQ ID NO: 844 - DNA, 81 bp, Homo sapiens
ggacgaaggtgactctctggatggaccagaatacgaggaggaagaggtggccataccgttgaccgctcctccaactaacca

SEQ ID NO: 845 - DNA, 74 bp, Homo sapiens
ggctacccctgcagagtagagacgtgtatagtgggggatatccactgggagccccagtcccaggtgaaagcaca

SEQ ID NO: 846 - DNA, 91 bp, Homo sapiens
gccgccaacgtccctgcagccaggcgcgcccccggccgcccgcgcctggccgggggagcgtcgctgccacgggatcttcgcgcccctgccg

SEQ ID NO: 847 - DNA, 141 bp, Homo sapiens
acagttataggagtaccggccataaaggtaaaaataattacaataaagaaaatgcaaaggaatatgggcagtttcgcacaatgagtttcacattttccagctttagcttcaaaaccaaaagtttctgcagtggatgttatt

SEQ ID NO: 848 - DNA, 41 bp, Homo sapiens
attctcttatgtagggcttaaggtgggacattttgataggt

SEQ ID NO: 849 - DNA, 39 bp, Homo sapiens
gagcatgcagggcccgcggaagaagcagtcccggctccg

SEQ ID NO: 850 - DNA, 101 bp, Homo sapiens
actgtcatttgaaggtggggcatcaggatcaggctcagaggaaggagctgcagatgcttcaataaccgcaggtgggaaatgacggcggcacacagggcatg

SEQ ID NO: 851 - DNA, 76 bp, Homo sapiens
taagggttaacttggattcatccaggagcaaaacttcgcagtaaaattcttccggaacagcgcagaaacagcccat

SEQ ID NO: 852 - DNA, 103 bp, Homo sapiens
cggttgtggtcgtctccagccaggagagaaagctaccaccgaggcgcccagccgccccctccactcaagcgcgatgcattaatttattgtccgcgccgtggcg

SEQ ID NO: 853 - DNA, 25 bp, Homo sapiens
tatatcctgcatgcagtgctcctta

SEQ ID NO: 854 - DNA, 75 bp, Homo sapiens
gactgacagctccaaaacggacacgctgaatagtagctcaagtggcacaacagcctccagcctagagaagatcaa

SEQ ID NO: 855 - DNA, 69 bp, Homo sapiens
atggtcagttggagtgcgtacgctggatggtgagcgaaacagaagccattgcagaactgagttgttcta

SEQ ID NO: 856 - DNA, 31 bp, Homo sapiens
cgttgttagcagggcaataggtcgtaataac

SEQ ID NO: 857 - DNA, 1865 bp, Homo sapiens
gaacttgcagaactccctcggagacgcaggttgcagtggacattgggattgttgcttgaaaaattaaaatttgaatattttctctctcatttgcatcatacagctctacctaggattgtacagtttaccataaaatttacttcatgaaagtgggaatcactgaacatgtagaagacaaggaacatattgttaactcctgattcttaactttattcaactggactcagaattgtagggataatatgaatgcaggaggaaacattctgtcaggcggtatgactggacagactttgaatatactctaaaagtggacagaaaatttacgaaaatcttagattttgtttagaatgagaaaatatacaattagaattattttagaaatagtaggaagtattgcagaagtcaatacacaaatgtgccaggcagaggtggttttctctgtttgactctcaaccaacttcagatctatgacattattctgatcactggctccatcatacatattcaccacttgagattcataacatatcaatagttatttcataaatatagaaatgaaataattttatttttgacagactggatggaatgagtgtgtaatgattgataaaggttgtaaattttaaatgcaagatgacgcttacgttctgtaaaccattagtaatacatgctgtaatatagaattagtggaacattttgattaatctttccctagaagtgactgaaatatttttgtgcatatttgagaaagggaactttccttttattaattgtcaatttagagaaactatgcttaagctggtcttttgcattgctaatgtgacatgtacccaacttttcattaatttgtatttccatttttaaattgcatattctatgttttgtagtgtttggattgttaatgaaaaaatattatatgttcgttattccttgtattattgccacttatcttttgcttgataaaaatgcgttgttcttttttcttttggagggacaagatgaaaatatataatttgaattgattaaaattggtcgttactaaaatagtatagtaaccacaagtgattggcttataaatgaagtagaaatgctttttaatattccaaaatagagttccttttgatctgttggtgctgagccttggttaaaccagggagaaggggagcagaaaggaaacgttgttactgatgagtaccacagactcatcttaaaaaaaactctcattatggtgatcatagaattgaccatccaaactgggacactcttgagagtaaatggagggcattattaataattatcttgtaatgaacttaaatctggactgttccaggcaaaccagacttatcttgcaatatgagaatgctgacacaatgcaggaaagccagtttcccttttgttgatctacttgaccaagcaaaggggctgaaaaactgaataaggaaacaactttataagagaaacagtggtcttcaatcttttaaagacatgaaatcctatatggcattctgtctcagtgagtcagttaacaaatacgtatgtgcaacccttctgctagtagtgcacataagtgattatccctgccaggtatcgagttggaatatccagttatttcatgtcacacatcggcacgtatgatggtggtttggtcagatggataatacagcagacacacttagaacactcactgcactggtggctgttcattttgaggaactccaaagtcaattcaaggaaataaggaatgacctggaacaggccttagaaacaattgatttattccaatagttaaccactggctggctcccaactctaggtgataggcatctaattgagacatgtgtgagtcaatagccatcggggtcctt

SEQ ID NO: 858 - DNA, 87 bp, Homo sapiens
ttcgcgcgaccctcgtcggtgccacacggggcgggctacgagctgctcatccagaagttcctcagcctgtacggcgaccagatcgac

SEQ ID NO: 859 - DNA, 103 bp, Homo sapiens
tgcatccaacaaactgccctggagctagttggccgaggagtcgaggttcacattgttgctgatgccacctcatcaagaagcatgatggacaggatgtttgccc

SEQ ID NO: 860 - DNA, 90 bp, Homo sapiens
tgccgagccggatggcgacgaagtgttgctgcggatcccggccttctctcgggacctgtacctgctgctccggagagacggccgcttcct

SEQ ID NO: 861 - DNA, 58 bp, Homo sapiens
aagcctgagaaatcagccaccacgttcccatgggtgagcatcgcaccttttgggttcc

SEQ ID NO: 862 - DNA, 80 bp, Homo sapiens
ggttacttctttctggacgagcggctctactgtgagagccacgccaaggcgcgcgtgaagccgcccgagggctacgacgt

SEQ ID NO: 863 - DNA, 596 bp, Homo sapiens
ttcagggttcagcagtacagccgagactcgactctgtgcctccctccccagtgcaaatgcatgcttcttctcaaagcactgttgagaaggagataattactgccttgaaaatttatggttttggtatttttttaaatcatagttaaatgttacctctgaatttacttccttgcatgtggtttgaaaaactgagtattaatatctgaggatgaccagaaatggtgagatgtatgtttggctctgcttttaactttataaatccagtgacctctctctctgggacttggtttccccaactaaaatttgaagtagttgaatggggtctcaaagtttgacaggaaccttaagtaatcatctaagtcagtacccaccaccttcttctcctacatatcccttccagatggtcatccagactcagagctctctctacagagaggaaattctccactgtgcacacccacctttggaaagctctgaccacttgaggcctgatctgcccatcgtgaagaagcctgtaacactcctctgcgtctatcctgtgtagcatactggcttcaccatcaatcctgattcctctctaagtgggcattgccatg

SEQ ID NO: 864 - DNA, 111 bp, Homo sapiens
tctgagcctctctcgtgtgcttttctggcacatttttcttttcccccttgggcggctctgtttctttgtaaggctttcctggtattctagtcaaaagattcaggtcaatct

SEQ ID NO: 865 - DNA, 25 bp, Homo sapiens
cttggcctttctttctacattggtt

SEQ ID NO: 866 - DNA, 36 bp, Homo sapiens
aaatatgtgagttgagtacggttgggctcggtgaat

SEQ ID NO: 867 - DNA, 24 bp, Homo sapiens
acattagagtttgttttattgcat

SEQ ID NO: 868 - DNA, 90 bp, Homo sapiens
cagcggggacatgctcactatcaacgggaaggcgatcatctccaataaagacatcctagccaccaacggggtgatccactacattgatga

SEQ ID NO: 869 - DNA, 52 bp, Homo sapiens
ccttctatgattggctgtaacatctgaccccttcgcttggtggatggagatc

SEQ ID NO: 870 - DNA, 24 bp, Homo sapiens
aagaataagttcaagggttgcttc

SEQ ID NO: 871 - DNA, 27 bp, Homo sapiens
ctgggctggactcccgtgctcctcagg

SEQ ID NO: 872 - DNA, 42 bp, Homo sapiens
tgctactttccgaacatagttatgtcgcttttccattcttaa

SEQ ID NO: 873 - DNA, 32 bp, Homo sapiens
ggactgaaaggcggtttactcgtgacttaatg

SEQ ID NO: 874 - DNA, 62 bp, Homo sapiens
gggagacaaagcagcgcccgtctgcttcgggcctctggaatttagcgctcgcccagctagcc

SEQ ID NO: 875 - DNA, 37 bp, Homo sapiens
ggtgcagaatctcggcggggagcttgttgtctctggg

SEQ ID NO: 876 - DNA, 120 bp, Homo sapiens
tctccgtgaccaggtcgtagagcagtgtgaccacgcgcacggcgagcacctccgtgcccttctcctgcaccagggtcctcaggacctgcagccccccgagcttcaggaactgccgctggg

SEQ ID NO: 877 - DNA, 36 bp, Homo sapiens
gcggcgagtccgagcgcagcgcgtcgtgcgccccac

SEQ ID NO: 878 - DNA, 145 bp, Homo sapiens
attccagtggtcagttcgtcgggccagcaaccttcatgaccttctggcagccctggatgcattcctagaggaggtgacagtgcttcccccaggtcggtgggacccaacagcccggattcccccgcccaaatgtctgccatctcag

SEQ ID NO: 879 - DNA, 43 bp, Homo sapiens
tcctgaagccggtgattcccaatctcctgtcccgcgacagcga

SEQ ID NO: 880 - DNA, 58 bp, Homo sapiens
gcggggaccgcagtcggctgctgctgctgctgtgcattttcctggggacgctgcgggg

SEQ ID NO: 881 - DNA, 24 bp, Homo sapiens
ctgctgcttgtggcgctttcaaga

SEQ ID NO: 882 - DNA, 116 bp, Homo sapiens
ctttgacggtcaagtagtccctggtcatgatatacctcccactgtggctgaacttcacatccgaaatcgaagagataatttcagagaaaaatgatctgttgcttggatcttccggc

SEQ ID NO: 883 - DNA, 25 bp, Homo sapiens
gtggccaccacgtggaattattaag

SEQ ID NO: 884 - DNA, 29 bp, Homo sapiens
cgatacagttggatccttggaaggagttt

SEQ ID NO: 885 - DNA, 169 bp, Homo sapiens
tccaggggaatctgtgtaatgtgccttttccctctccaaatgcctagaaccatggcactgtgtcttatttatttaaccgttgggctgtctcatactaaacttgcaaagatatttgcctatgaactgaacaagacttccaggagttgaagtctggttcacaagggtaccc

SEQ ID NO: 886 - DNA, 136 bp, Homo sapiens
tgtggaagtggacgatctgccatttgccatcccggcggtgccagacacgggtctcctccgactgggcggtgcgtgggatgccgccagcgtccaggtactgcgtgatgcggatgtaggcgatgcaggctgactcgtc

SEQ ID NO: 887 - DNA, 25 bp, Homo sapiens
tggggagagatatccaggagtccct

SEQ ID NO: 888 - DNA, 41 bp, Homo sapiens
ttcatgtagcgaaggttgggaattgacatgattctcacttc

SEQ ID NO: 889 - DNA, 124 bp, Homo sapiens
ctgccatgcccacatctctagacgtccagcgacaaaatccacatgccaggtaataggctttcttcatggtggtcttggctgggtcatctggaagctgtgtggagatgctcgtggcccgagtaga

SEQ ID NO: 890 - DNA, 124 bp, Homo sapiens
gaggcctcgggtcgcagacggacgcacgggcgcagggactcgaggacgcagcgctcgctggatcggagcccgttagcccagcagcaaccgcagcgcggggcggaccgggaggacagccgtgggc

SEQ ID NO: 891 - DNA, 153 bp, Homo sapiens
gctcaagaagaacgccaatcagtttgagggcaatgaccgttacgagggctactgtgtagagctggcggcagagattgccaagcacgtgggctactcctaccgtctggagattgtcagtgatggaaaatacggagcccgagaccctgacacgaa

SEQ ID NO: 892 - DNA, 28 bp, Homo sapiens
gtagctgaaaggcgtcctggatgtagga

SEQ ID NO: 893 - DNA, 162 bp, Homo sapiens
ctcgttttatactcccagggctccttattaaaatatctaaaaggtccaagaaattaataaggatagacatattaagttttctcagttctttcttgtgatcaaactgcataggatgaagccgttcgatgccctgactttccaaagggcggatgataagatcat

SEQ ID NO: 894 - DNA, 117 bp, Homo sapiens
gagcgcatccagcgcctccgccgtctcatggtggccaaagaggaaggggacggggccgcaggagcgggccggaggggtccgggtcggagcaggaaggcgccacgcaacgtgctcacg

SEQ ID NO: 895 - DNA, 28 bp, Homo sapiens
agagagtgtagcagctccgcacgtcacc

SEQ ID NO: 896 - DNA, 102 bp, Homo sapiens
tctgctgcttttgacactgaatgtcaaatcagtactgattgtcgtcagccaccagcaggtgaaacgtccagaataattcttggcctcgcatcttagaaaggt

SEQ ID NO: 897 - DNA, 90 bp, Homo sapiens
aggtagacggccaggtgccgggctgcagggcagagctggcagtggctgctcagcagggtcaggatgtccacgaagaaccggcggctcttc

SEQ ID NO: 898 - DNA, 67 bp, Homo sapiens
gcgtgtaaccgaagtgaagactgatatcttcgtcaccagtttcggacccgtttcagaccatgatatg

SEQ ID NO: 899 - DNA, 24 bp, Homo sapiens
tggagtccgagaggtggcaggcag

SEQ ID NO: 900 - DNA, 176 bp, Homo sapiens
cttctacaaacgaggagccgtccgtgcactggaagacgtatttccgccgcttgctgcgggtgggctggcagcactggggcccacagcccccacgacattccatgatgggcaccttggaggctgtggcacatgatgcataacctttctggcggcggatcacctctcggactacttgt

SEQ ID NO: 901 - DNA, 128 bp, Homo sapiens
gtgctgcagagcacccaaccattgccaagtcggtggagaacttcgtgaacctggtcaaaggcctcctggagaagctgctggattaccggggtgtgatgacagatgagagcaaagacaaccgcatgagc

SEQ ID NO: 902 - DNA, 70 bp, Homo sapiens
tggtttatctttctaagagcagcttctgcctctggtcgggtaatataagaaacgtaccactcttcattta

SEQ ID NO: 903 - DNA, 46 bp, Homo sapiens
ttgagagaagtatggtggcagggaggcactctgtggaaaactgctg

SEQ ID NO: 904 - DNA, 31 bp, Homo sapiens
gacagggacagttaggaacaggctcacacac

SEQ ID NO: 905 - DNA, 32 bp, Homo sapiens
tttttcggcaagtctcgctcttgtgccccagg

SEQ ID NO: 906 - DNA, 32 bp, Homo sapiens
catggctcactgtaacttctgcctcccgggtt

SEQ ID NO: 907 - DNA, 208 bp, Homo sapiens
cttttcggctctagggtccttggctgggtcggggtcgctgtaggcacgtggatagaaggcgggggcggcgggaaaggcagacgcacacttggccggtgaaggcgcgcggcccagctctgcgcgcagctctgggaggcccggcgcagccgcctcgggcccagcgtaggcctctggcttgaaggcggccagcatgcaggaggagggcgcc

SEQ ID NO: 908 - DNA, 154 bp, Homo sapiens
cccagcctccctggatgcttactactcctcccaggaccccaattccagaagccgcttctacacagtcatcagccactacagcgtggccaagcagagcactgcccgggccatcgggccgtggctgtcagcagccgctgtcatccatgagcccaag

SEQ ID NO: 909 - DNA, 24 bp, Homo sapiens
attcgatccgcggcgctgccttcc

SEQ ID NO: 910 - DNA, 102 bp, Homo sapiens
gattcagggaacaatggcgtcatcctgttctccatcctccgagtagacttcatctctaaggacggggccaccatccctttccagggtgtcttctcgatcttc

SEQ ID NO: 911 - DNA, 79 bp, Homo sapiens
caagcccgtctggtgacaagggaaagagaagctgaagccaagctgcagaccctgtttgttcacaggctgcgcatccagg

SEQ ID NO: 912 - DNA, 79 bp, Homo sapiens
gtcgtggcccagtcgcactacctggggaagacccacgcaaagaacttaaagctgaagcagcagtccactaaggtggaag

SEQ ID NO: 913 - DNA, 74 bp, Homo sapiens
tgacctccagcaacgatgatgaggaccccaagtcccatagggacccctcgaataggcacagttacccccagcaa

SEQ ID NO: 914 - DNA, 31 bp, Homo sapiens
ggcgtccaccacattgactactataagaaaa

SEQ ID NO: 915 - DNA, 390 bp, Homo sapiens
gttaaatcactcacccaggccagacttctttctcagcctcctgccaaggcctttttatatgagccaacaactcaggcctcaggaagagcttctgcaggggctgagcagaccccagggcctcttagccaatccccgggcctggtgaagcaggcgaagcagatggtcggaggccagcaactacctgcacttgccgccaagagtgggcaatcttttaggtctctcgggaaggccccagcctccctccccactgaagaaaagaagttggtaaccacagagcaaagtccctgggccctgggaaaagcctcatcacgggcagggctctggcccatagtggctggacagacactggcacagtcttgctggtctgctgggagcacacagacattggca

SEQ ID NO: 916 - DNA, 78 bp, Homo sapiens
tgggggggtcgcttcttcctcctgtggatggggcctggactgcgatgcgggcacagggacgcataaccatgctcggcc

SEQ ID NO: 917 - DNA, 75 bp, Homo sapiens
gcaatgggatgtccaaccgcttctggggctggggccgcgaggacgacgagttctaccggcgcattaagggagctg

SEQ ID NO: 918 - DNA, 438 bp, Homo sapiens
gaggaatcctacccaggcctgagtgcctccatccagatgcacagccccaggtctcctcttgctgagacagctcctcctccactccaaccccatgtttcattctggggtctacacgttcttccacactgcccaatccccaggttatgggggttgactgaggggaggaaatctcccgcaaaccaggcaaagcccagggcttcatcatcctctttggacttcggatgagagaataagtttagtccctttctagagctagaaccttctcggtggctgtttcccaccatgggaagcgagtctggtctgtggtgaggaagcatgaagctcacatgctggaatcggggtagagctgggtccagttccttctcaaggccagccccaccgacgcggagcatggtcttggcaaactccctgccactgactgttcaccgtggacccggg

SEQ ID NO: 919 - DNA, 89 bp, Homo sapiens
tctgcagcgtctcccggccgtcctcgtctctgtactcccactccacgcccatggcaatgaaggttttggaactggcatccacgtcattc

SEQ ID NO: 920 - DNA, 55 bp, Homo sapiens
gaagataaatttggaacgttttcaaagggaaagcaaaattcgtgaaaatacttat

SEQ ID NO: 921 - DNA, 62 bp, Homo sapiens
cattctccgtcttctcatggcctctcaactctcctgcaggacccatctcttgtctactcctc

SEQ ID NO: 922 - DNA, 25 bp, Homo sapiens
tgcccacggtgttggtgacgcccac

SEQ ID NO: 923 - DNA, 55 bp, Homo sapiens
tctcgggctccttcgcggctcgagggggtctgcccgttcggacgctggggctcct

SEQ ID NO: 924 - DNA, 91 bp, Homo sapiens
cacctggtcactgctccacctcatgctgagaggagcctgtgtgtcaaaccccaggggaaaaagggacaggcagatcgaattctgtcttcta

SEQ ID NO: 925 - DNA, 206 bp, Homo sapiens
atcagttccatgctgtggtccacctctacagagatggggaagactgggaatctaagcagatgccacagtatcgagggagaactgagtttgtgaaggactccattgcaggggggcgtgtctctctaaggctaaaaaacatcactccctcggacatcggcctgtatgggtgctggttcagttcccagatttacgatgaggaggccacc

SEQ ID NO: 926 - DNA, 233 bp, Homo sapiens
cacatctggcgaattatctggaccatgttggccagctgcaagttgggacgaaagctgcgacgtgtaaagctctttcggcactgggggcaggtgaactgccctggaaggggcaaggaaggaggcgggtggatgtcaggatacagctcttcatcttcgtcctcatcgtatgcttccagtatttcttcttctcggtagacatcaattctcaggtcaggtctcaagcctcctaggta

SEQ ID NO: 927 - DNA, 139 bp, Homo sapiens
catctgggttgcggtgtttccctttgcccctaggagaaccatggccagggcagaggagatgctcacaggagaacagaacacgttgtgcgaagggttatcttgacacagtatctttaaaaggcgtatggcaaaagtacca

SEQ ID NO: 928 - DNA, 63 bp, Homo sapiens
gcagatcacgcttgcgaaggcggtctcgatcacgcggtggtcgtagacgaaggagcagaagca

SEQ ID NO: 929 - DNA, 127 bp, Homo sapiens
gggatggcaactgcggtcaccctgctaaagtcggggcgggggcggcggtcctccccctcaccccccccagtccgagcgccgccgccgccgccgccgccgccgccgcggccgctcagtaacacgtccc

SEQ ID NO: 930 - DNA, 266 bp, Homo sapiens
gtgggagggagaacgctttccaacctcctccaccaaggactctcacaaactcgcaatcgggctcccggagtgctggaacgcccctgtgtgacgtccgcccgcgccgggggaactccgcagagacaggtgcagcccgcgaggcccgagcgaccctactgtgggtgcggtgtcttcccagagagtggtgaagttaggaaggtacgaccccctaggccgaacagcctgtgggctagctggcgcctcctgccgcagtaaacacaaagtgg

SEQ ID NO: 931 - DNA, 77 bp, Homo sapiens
ctggcctcatacacctcaggactggaaactctgctgaacatacctatcaagaggaccatgattcagtccccttctgg

SEQ ID NO: 932 - DNA, 144 bp, Homo sapiens
ttgagcccgccaaaaagttatgagaagctgaacagttccagtgaaaggtattttaggaaaactgcctgtaatcacgccttagagaaaatgccagtctttttgtgggaaaatatattaccatcacctttgcgaagtgtcccttgc

SEQ ID NO: 933 - DNA, 795 bp, Homo sapiens
gagtggctcgttcccgtaaactggaggcttgatttaggagttgtctgatgttgtcttgtacttttcctgattgatttacccaaaagcaacatttttcatctaaggccaaacaaattcctccctgtgctgccgttaacatgtctagtcctcgacgattttgaaggactacggctgctaaagagtcgatttgttcttgcatggtcgttaaggctttagccatggtgtcaatgttgttggctatttcctttgagagctggctataggtgagggaagcttttgtgattccagcaattccggttcccgtaccagctagaatgccgagtcccgcgagaaggggaatgaaatggattgccctcctcaccctgggcaacggggaattcccatagattggtattggaagagagagattgccaggggctatgaagatgtctggggttacatagcctatggtacaagttccagtccagttactggggaggcattggtgaatcgactggccacaaatataaaaggctccttgagttttaaggcatgtagagatatggaaatgaaataagggggtgagggaggttccaaaaaattctgagactgctgatatgcccaggtagctggtggctatagtcatgcctgctaagacttggacgcagggtgtttggctctggttagctcccttggttttattttcccaaaaaagagaatttcgagtttggtccaatagaacccattccgctgtagagctgaggttggaaatttgcagacattggttataatcagcaggccggaaccagaagtttc

SEQ ID NO: 934 - DNA, 57 bp, Homo sapiens
gttgagactaagtggtccgggagaagcagaggaagccgtgccctgtgcgctgaccga

SEQ ID NO: 935 - DNA, 29 bp, Homo sapiens
ttctctattttgtccgggtgtcatatttt

SEQ ID NO: 936 - DNA, 155 bp, Homo sapiens
tggggttagcaaaccgcacgccaagctcatcctggcaggcggcggcggcggcgggaaagcagcggctgccgccgccgcctccttcgccgccgaacaggcgggggccgccgccctgctgcccctgggcgccgccgccgaccaccactcgctgtaca

SEQ ID NO: 937 - DNA, 57 bp, Homo sapiens
ggtgaagcgcgtctacctgttcggcggcctgggcacgtcgtcgtcgcccgtgggcgg

SEQ ID NO: 938 - DNA, 39 bp, Homo sapiens
cggcgcagctttgcgggcccgaccggctccgcgtggcag

SEQ ID NO: 939 - DNA, 34 bp, Homo sapiens
cacctgaggactgtcggcggcaagcctcagatgg

SEQ ID NO: 940 - DNA, 24 bp, Homo sapiens
gcttctcaagccctaaaaacaaac

SEQ ID NO: 941 - DNA, 156 bp, Homo sapiens
aaagggcctcggtgatcaacttggacacagagaggttcggcactttgcgacttgcacttatcaagccagccggcttcctccctcgcttcttggttggaagtttctccatagcggctacaccagcactggcagaagctgcaggcacggtttcagaca

SEQ ID NO: 942 - DNA, 74 bp, Homo sapiens
agttccccagtctcacagccatggaaacaagccctggccatctcagcagccactgcacaatgcctctggtggaa

SEQ ID NO: 943 - DNA, 130 bp, Homo sapiens
acgtgaacgggctcgcctggcaactgcccaggacaaggcccgctccaacaaagggctcctggccaggatctttggagccccgccaccctcagagagcatggagggaccttcccttgtcagggactcctga

SEQ ID NO: 944 - DNA, 25 bp, Homo sapiens
acccgctcttctcgtgccggtctcc

SEQ ID NO: 945 - DNA, 24 bp, Homo sapiens
gccttgggggctactgaatatctt

SEQ ID NO: 946 - DNA, 116 bp, Homo sapiens
aagagcacaacaagagtgatataggaggagaaaactatggcaagagaggcaaaggcaaaggctgcatcctgctggctggacagaatcatggtgacaggagcagtgatgaggcacag

SEQ ID NO: 947 - DNA, 29 bp, Homo sapiens
cccagcgctgggcattccccatctttgca

SEQ ID NO: 948 - DNA, 27 bp, Homo sapiens
gacaagtctgttagaggctggggcctc

SEQ ID NO: 949 - DNA, 30 bp, Homo sapiens
aacatgaagatatcctcccagggttgaagt

SEQ ID NO: 950 - DNA, 95 bp, Homo sapiens
acattgtagctccatcacccaggctggagtgcagtggcatgaacatggctcactgcagcctccacctcctgggtttaaaggatcttcctgcctca

SEQ ID NO: 951 - DNA, 56 bp, Homo sapiens
tggagttcccgttcgatgtggacgcgctgttcccggagcggatcacggtgctggac

SEQ ID NO: 952 - DNA, 28 bp, Homo sapiens
tggtgtcaggttctgtttacgtccttct

SEQ ID NO: 953 - DNA, 132 bp, Homo sapiens
atgtccacaggaaacctgcgtccggggattcgaaacacaggggcgtcatcaaagaaggtggaaaaacgggcagtgtccattgtggctgaagccaccaggaccttgagctcaggtcggaagcgagcaacatcc

SEQ ID NO: 954 - DNA, 41 bp, Homo sapiens
tccggtcttcctcggccatcttgaggcgcttctgagcctct

SEQ ID NO: 955 - DNA, 127 bp, Homo sapiens
aggaacttgactgtccggcggatgcgatcagtgaccaggtgggaagcctctgccgctgaaccagccagacttccccccagtgccagcacagcccgctctccccgagcatccaccactcctgtgaaga

SEQ ID NO: 956 - DNA, 129 bp, Homo sapiens
gacaaggcacaaactatttggcaaggagagatgaggggtgggacctcactgtcaatggacatgctcagggaggccagtgggttacatgcaacaggaggatcattcaggcaacttcagctatgaggctgg

SEQ ID NO: 957 - DNA, 27 bp, Homo sapiens
catccagggtgcccgagacgagcccat

SEQ ID NO: 958 - DNA, 87 bp, Homo sapiens
atacaaaatttagccgggaggctgaggcaggagaatcgcttgaacccgggaggtggagattgcagtgaggcgagattgagccactgt

SEQ ID NO: 959 - DNA, 37 bp, Homo sapiens
gcccgtgcttcgtgctttggactaccgcccagcagtg

SEQ ID NO: 960 - DNA, 43 bp, Homo sapiens
aaagggagtctgccgaacagtcgtctgggcccggaccaagcct

SEQ ID NO: 961 - DNA, 30 bp, Homo sapiens
tttctttagtctcaaaacaagagactagga

SEQ ID NO: 962 - DNA, 243 bp, Homo sapiens
agaaggacagggactacagtgctaggctgaggggcagccctgtgcaggcgccgccccgctgcgtcctggccaatcagctccagggagaagggtctaggggtggacagcagcgtgggcgacagcgaggctgcgaggagacctcgctccggaggtcccacgggctccaagggcacctggcctagttcggcaccctctgggacccctcgaaggatgacgtgggagaaatgcggctgaggatcccca

SEQ ID NO: 963 - DNA, 26 bp, Homo sapiens
ccatcctccatggggatcccaaagtg

SEQ ID NO: 964 - DNA, 67 bp, Homo sapiens
tgctgatgtctccgtggatccggactgtgatcttctggagcagcccatccacgctgaacacaagtgg

SEQ ID NO: 965 - DNA, 96 bp, Homo sapiens
gatgagttccaaagtagccagaggtgaggagtgtgaagcccagccaattcctggggcagctcaactcctcgcaatcggagcaggtaggatcggcca

SEQ ID NO: 966 - DNA, 190 bp, Homo sapiens
catgaagtgcagccccgaggcgctggcgagccagggtgtggtcaagggccctggctgccaccacggtctcccgcagagcccctaccaggcgcgcgcgtccctgacccagtcgctcagcatcaaagtgcaggtcggggtcattcctggaagttggcaggaagtcctgggctgcattggcacgagacacctc

SEQ ID NO: 967 - DNA, 69 bp, Homo sapiens
cacgaagggcaaacttggtggcattccagagcttgttgcagaagtggcggtaacccagtatccggttca

SEQ ID NO: 968 - DNA, 59 bp, Homo sapiens
atccccaccacgatgtaacctagaatgaagagcaggaagaggacgcagcagatgacatc

SEQ ID NO: 969 - DNA, 85 bp, Homo sapiens
agcacatggcagatctccacggagcccttctgggcggctgcatgcaggggcgtgcgcttgctctgctggtcgctctggaagttgg

SEQ ID NO: 970 - DNA, 135 bp, Homo sapiens
gggtactgctccaacccgggcatccccattggcacaaggaaggtgggcagccagtaccgccttgaagacagcgtcacctaccactgcagccgggggcttaccctgcgtggctcccagcggcgaacgtgtcaggaa

SEQ ID NO: 971 - DNA, 87 bp, Homo sapiens
tccaggcagtgtacagcatgatgagctggccagatgacgtccctcctgaaggctggaaccgcacccgccatgtcatcatcctcatga

SEQ ID NO: 972 - DNA, 42 bp, Homo sapiens
ctccgcgtgcggaagaaggaggtgtacatgccctcgtccatc

SEQ ID NO: 973 - DNA, 197 bp, Homo sapiens
gcgtttcccattctggagtccaaagagcaggaacttgtacttgcgggccgggtccagccccgagacggcgaccgctcggaggtctccgctcacaggcactgcctggggctgcccctgcgcgtccctgtactgtaccaggaaggagtcaaaggggccctgggccaccgtccatgagaggcccactgagtccgaggtca

SEQ ID NO: 974 - DNA, 46 bp, Homo sapiens
accagggacatcttgggccgggaggtcttgttgtggctgatggctg

SEQ ID NO: 975 - DNA, 29 bp, Homo sapiens
cacggactacttgaagtggctgttcccca

SEQ ID NO: 976 - DNA, 26 bp, Homo sapiens
ccacccaccagtctgagctgcttctg

SEQ ID NO: 977 - DNA, 71 bp, Homo sapiens
cagccagcatcaagggtgtggtcccgtcctctgtgcgagcgtccactgcagtttgtctgctacggagcaga

SEQ ID NO: 978 - DNA, 25 bp, Homo sapiens
cccaggggtgatcctgctgtggcct

SEQ ID NO: 979 - DNA, 31 bp, Homo sapiens
tccctccatgtggatgctaggggcagacccc

SEQ ID NO: 980 - DNA, 29 bp, Homo sapiens
cctggatagtcctgtcaccgtggagtgga

SEQ ID NO: 981 - DNA, 25 bp, Homo sapiens
tcccaccactcctggaggaccaggg

SEQ ID NO: 982 - DNA, 36 bp, Homo sapiens
tctgtccccgcagattgcacatagccgtttgccagc

SEQ ID NO: 983 - DNA, 75 bp, Homo sapiens
gatctgatagttggtcatgggtttcctgaaggaataaatcttctggaggataaactctcggatcttcgtcactgc

SEQ ID NO: 984 - DNA, 66 bp, Homo sapiens
catgttcctgcgcgtgctcatccacctcaccatgcacgactatgcgccgctggtctcgggtgccct

SEQ ID NO: 985 - DNA, 77 bp, Homo sapiens
cgcttgttctctgggtactcggagcacaggcgggtcaggtgggcctggtggcattgcaggccccacgggttgaagct

SEQ ID NO: 986 - DNA, 203 bp, Homo sapiens
agtcgtatgctcatcgtcccaggtcaagggggcatgccagggtggggagggcgtcaggccgctgctaggatgcgggccagcaacagcggacaggaggtggttcccacggcgctgggaggctcaggccggaggtgggggtgttgggggatgcggatgggccgccccgcgcccgaacatcctggaagcccgtcacccgaggcgtg

SEQ ID NO: 987 - DNA, 24 bp, Homo sapiens
caaaaattccaactaatcttccca

SEQ ID NO: 988 - DNA, 117 bp, Homo sapiens
gcacgaactggtagacgaggcgctgggagatgtctggcttccggatgatgcccttcttgtaatactggcggatggagcggctcagcttgtcgtagttcatggcgggacggttcttgc

SEQ ID NO: 989 - DNA, 139 bp, Homo sapiens
taccacggccagacggagcagtgtgtgccatgcccagcgggcaccttccaggagagagaagggcagctctcctgcgacctttgccctgggagtgatgcccacgggcctcttggagccaccaacgtcaccacgtgtgcag

SEQ ID NO: 990 - DNA, 90 bp, Homo sapiens
ctctgcttgcccaccgtgactcctccctaaagcgcctgacccgctggggatcccagggcaacaggaccccctcgcccaacagcaatgagc

SEQ ID NO: 991 - DNA, 96 bp, Homo sapiens
gtgctgcctgttggtttctggtgaactcatttcccctttccctgtctttgttcccacagaggccgtcagctgatctttaccgtggtctcttctgtc

SEQ ID NO: 992 - DNA, 69 bp, Homo sapiens
ccagagaagaagatcgtccaggagctgctggagacagagcaggcctatgtggcgcgcctccacctgcta

SEQ ID NO: 993 - DNA, 33 bp, Homo sapiens
tcttcgtcacaggagaccgcgccggtggccgga

SEQ ID NO: 994 - DNA, 121 bp, Homo sapiens
aggcagcatacgtcccagggacagtgggtttggatctgtctagaacagcggtttgtggctgtggcccagctccgagagtgatatttgctctggtaggtgagggcctgagggtacatttctc

SEQ ID NO: 995 - DNA, 84 bp, Homo sapiens
ctgtgtccctctgggagacggtgcagaaatggcgagaataccgacgccagtgccagcgctccctgactgaggatccacctcctg

SEQ ID NO: 996 - DNA, 131 bp, Homo sapiens
gctgcctttagagtcgctgctgcttccgccttctctcctggggtttgtgcgccctgactggcagcagggggttgggccgccagacccgcccgtttccgcgccgcccgaaactcagctaaccgctgttccat

SEQ ID NO: 997 - DNA, 50 bp, Homo sapiens
tcatggccttcttcccgatctgcttgatgaggtcgttgtaggtctcttcc

SEQ ID NO: 998 - DNA, 162 bp, Homo sapiens
ccccccgcaagaggagccaccatggcctgggcttcctgtgctgcttcgggggcagtgacatccccgaaatcaacctccgggacaaccaccctctgcagttcatggagttctccagccccatcccgaacgcagaggagctcaacatccgctttgcagagctgg

SEQ ID NO: 999 - DNA, 74 bp, Homo sapiens
caagtagacttccacatagggctctggtcttccaggtgggtcacgtgtagaaggatcgctgcacatgctgtagc

SEQ ID NO: 1000 - DNA, 24 bp, Homo sapiens
tcctgttagtgctcctgatctgca

SEQ ID NO: 1001 - DNA, 52 bp, Homo sapiens
cagaccggaggtgcgtcattcaccggcgacgccgatacggttcctccaccga

SEQ ID NO: 1002 - DNA, 30 bp, Homo sapiens
gtgccgggtgccttcgcaacacagcagctc

SEQ ID NO: 1003 - DNA, 24 bp, Homo sapiens
gaacagcacaaattcagaagattc

SEQ ID NO: 1004 - DNA, 28 bp, Homo sapiens
gtcccagcaatagcacgccgccccccac

SEQ ID NO: 1005 - DNA, 24 bp, Homo sapiens
ctggcacaggtatctgaggaacac

SEQ ID NO: 1006 - DNA, 33 bp, Homo sapiens
atccccggctccattacttgtaagggaattggg

SEQ ID NO: 1007 - DNA, 68 bp, Homo sapiens
tcagcatgactcccagcagtcagggtcttgtggcaacgctggcacctcagacacggtcggtgccaatt

SEQ ID NO: 1008 - DNA, 37 bp, Homo sapiens
gggtccagccttgcgctcgcagtcacgcccatggaag

SEQ ID NO: 1009 - DNA, 31 bp, Homo sapiens
agcggtaccggctggactgcaacctggctgt

SEQ ID NO: 1010 - DNA, 25 bp, Homo sapiens
tgggggaagttgaccatcttgatag

SEQ ID NO: 1011 - DNA, 27 bp, Homo sapiens
gagagactgactaaagaccgaaatgat

SEQ ID NO: 1012 - DNA, 25 bp, Homo sapiens
tgagagggcacgcttactctgtgac

SEQ ID NO: 1013 - DNA, 25 bp, Homo sapiens
catctcccgagaaatgctccagcag

SEQ ID NO: 1014 - DNA, 24 bp, Homo sapiens
cacgtaggttggattatcctgttc

SEQ ID NO: 1015 - DNA, 245 bp, Homo sapiens
atggccattgcagtagtagatccatttctcccggttctgggttggagtcatggatttcttcagccctgccttttccacaatggcactgggatcctgccggggcccctttttcagagtcctcgagcttttccggatactgcacaccacaatcaccacaagcaccagcagcaggaaaagcacaatcatccagggcaaatgctcattgatgtcaaaatgcttgtgtaggttctgtctaggatgtcccc

SEQ ID NO: 1016 - DNA, 36 bp, Homo sapiens
gagaagggagcccgcgatcatcgtggctgtggctcg

SEQ ID NO: 1017 - DNA, 26 bp, Homo sapiens
ctgcacaccgtaaccacagtcaggaa

SEQ ID NO: 1018 - DNA, 36 bp, Homo sapiens
cctgaatagtttccgggtgtactgaatgaaggcaga

SEQ ID NO: 1019 - DNA, 88 bp, Homo sapiens
gctcccgctccaggttccttgaagcacttccgaccgcgaagcccggcgcgagaagcgagctaacccaagagccaacaacgagcgcgga

SEQ ID NO: 1020 - DNA, 24 bp, Homo sapiens
acccagctgcgaagactagaagaa

SEQ ID NO: 1021 - DNA, 129 bp, Homo sapiens
atcagcaggagaagccgtctcatcattttcctcttgcagtgtgtcgtagtcctcagggtgcaggcaatcacgatcatcaccatcaagaagcaaagaatcatggtcatcatcttcaaacaagggagtatc

SEQ ID NO: 1022 - DNA, 29 bp, Homo sapiens
tgaacctggaattgggctgccagggagtc

SEQ ID NO: 1023 - DNA, 76 bp, Homo sapiens
acctgctcggcggggtcagcttccgcgagcccaccaccgtggaggactgcgactccacctggcagaccgactcgga

SEQ ID NO: 1024 - DNA, 108 bp, Homo sapiens
tcgagaccacaggggggtcaggtagccaaggctgggctttgacggtaggaatgaaggaggtgagggtggcgcgccgcaggcctgggccactccctgagtagggcggcg

SEQ ID NO: 1025 - DNA, 46 bp, Homo sapiens
gtttaaagctttgggcttaaatgaaaatgactacaagtttgggtta

SEQ ID NO: 1026 - DNA, 39 bp, Homo sapiens
tcctcggcgccgttcctggcttccgccgtgtccgcccag

SEQ ID NO: 1027 - DNA, 69 bp, Homo sapiens
tgactgtcgtctccgtcccgcagcgggagccgctcgtcctgggtggccgccttgcgccgcttggctttt

SEQ ID NO: 1028 - DNA, 24 bp, Homo sapiens
agtgggagctctgccaaaagttcc

SEQ ID NO: 1029 - DNA, 56 bp, Homo sapiens
ggattttgactttgagctggagagccgggatttggccccctttctgttgtcagtca

SEQ ID NO: 1030 - DNA, 64 bp, Homo sapiens
cttggtgtcaacgtgggaaagcccttgaggttttctgtcgctgtcaggaggaagcacgaaaact

SEQ ID NO: 1031 - DNA, 26 bp, Homo sapiens
ggaggcctgcagtccgcgcggccgcg

SEQ ID NO: 1032 - DNA, 94 bp, Homo sapiens
agggtctccctaagttgctcaggctggtcttgaactcctgggctcaagggatccttccacctcagcctcccaaagtgctggaatatgaggtgtg

SEQ ID NO: 1033 - DNA, 129 bp, Homo sapiens
tacactgagacttcgtcacacataaaacaagcacgacaaagaaagagggcgcgaagggactcctggaagaaattgagtctacatttaagatcaccctaaaagtagtgacggcctcttcattactccaaa

SEQ ID NO: 1034 - DNA, 24 bp, Homo sapiens
gaattcgtgacctgataccaggtt

SEQ ID NO: 1035 - DNA, 49 bp, Homo sapiens
catcctcgtccagctgcgactcagcgccttccacgtcctgtttgtattt

SEQ ID NO: 1036 - DNA, 44 bp, Homo sapiens
tccttttccactgctgccgagatggcgcgttttttagtcgtcac

SEQ ID NO: 1037 - DNA, 55 bp, Homo sapiens
agactgcgcgggcccggtagccctggagaggccgaggctctaggccgcgaggggc

SEQ ID NO: 1038 - DNA, 33 bp, Homo sapiens
tcaggggcgaaagcgtcgccagcgtcgccggcc

SEQ ID NO: 1039 - DNA, 149 bp, Homo sapiens
agcccaagatgaggtgtacctgcacccatctgaagaacatactaatgtattgttacttaaagaagaatcatttaccatacatggcacacattttccagtccgtagaaaggaatttatgacagtgcttgcgaatttgaagagagtcctcc

SEQ ID NO: 1040 - DNA, 46 bp, Homo sapiens
ccctggaactgaggggcgttcaacctgtatcatgcccagccaacta

SEQ ID NO: 1041 - DNA, 101 bp, Homo sapiens
atacaacgagttctctcttgctgaaatctttgtaaaaatggtccaacaagatggtatacataaagcaactggaattcggtcttcactataggaagaagtac

SEQ ID NO: 1042 - DNA, 88 bp, Homo sapiens
ccctttccgatcactttcaagaagtgaaagtcagatggtttagcatgaggattggacgacgggccaaggttgatttgctgagaaggac

SEQ ID NO: 1043 - DNA, 126 bp, Homo sapiens
ggagccgacacccggagcagtgcaaatcaactcccccagcctagcggcgcgtgcgcgaagtgaggcggccacgcagccacctaacccgccagcgacccgtgtcctgaaagcaagccgcggctctgt

SEQ ID NO: 1044 - DNA, 25 bp, Homo sapiens
cagagatgtgaagccagatcctcat

SEQ ID NO: 1045 - DNA, 86 bp, Homo sapiens
gcttcgggaactgccagcaacacggagaccacccagatacccatggccttcacacaggtccgcagcaatgcccctgacgtctgcat

SEQ ID NO: 1046 - DNA, 74 bp, Homo sapiens
tgtagcaagtaatactatccaacctactccacagactatacctgccattgatcccgcacttttcaatacaattt

SEQ ID NO: 1047 - DNA, 55 bp, Homo sapiens
tccacttttcggtctcctctgccgacaccgagcacgcgccgcttgcagctggctt

SEQ ID NO: 1048 - DNA, 82 bp, Homo sapiens
gcaggccggctgtcctctctgcaggctcccgcggcctcgggagcgctgttcttccgtctctgccgctgagtatgccgcgccg

SEQ ID NO: 1049 - DNA, 26 bp, Homo sapiens
aaatcttcttgtgcccgggccaaggc

SEQ ID NO: 1050 - DNA, 53 bp, Homo sapiens
ccatcacgcaaggtaggtggtatccctgggtgcctggctatcaacaattccat

SEQ ID NO: 1051 - DNA, 294 bp, Homo sapiens
agaaggtggtacatcactatcagcatgatttagagattcagcacagtcctctgtttcatgttcttggttgaattcagagatacatgtacttttagacatagcaacatcagttattccagagtcgctagtagctggacagtgaccttgtgaatcgggattgataaatggttgactttttcctttttttgtggatggaacaagctttttcctcaatttactgcgatttctcctggacttataataataatagtaaggatcatcatcatcatcagaggtgtctgatggcaagtattc

SEQ ID NO: 1052 - DNA, 66 bp, Homo sapiens
atggcaccttgactatatggaatgtaaggtcccctgctaaaccagtacagacaatcactccacatg

SEQ ID NO: 1053 - DNA, 30 bp, Homo sapiens
cattttaaccccagcgctattcataacttt

SEQ ID NO: 1054 - DNA, 34 bp, Homo sapiens
catcctgcccagccttgctaagtggaggcgcatc

SEQ ID NO: 1055 - DNA, 27 bp, Homo sapiens
aggactcggcgcccgtggccacggcgg

SEQ ID NO: 1056 - DNA, 33 bp, Homo sapiens
gacctcaagcgcaaacctctggaccagatcatg

SEQ ID NO: 1057 - DNA, 45 bp, Homo sapiens
gtaacagacataaacctggggaagctggtgcgaggggatgcccat

SEQ ID NO: 1058 - DNA, 146 bp, Homo sapiens
gctgggtgattgtctccaggctgcttgtctccaggaggtcaggtgccaccagtctgccagacatctgcagcagccacttttcgacctcttggagctcactgttgtagtcttcatggtctttgactttcgcctccagactgaagaca

SEQ ID NO: 1059 - DNA, 26 bp, Homo sapiens
tgggagggggctatacgcagaggaga

SEQ ID NO: 1060 - DNA, 164 bp, Homo sapiens
cggtccgggaagcgtatcataaccacctgggagttgccaagaagcagacagtctcccagtgtctgactctcggatatttggatttgactggtgtgaggcaaagtgaaaaagggatgggggaaatggagatggcacgggctcctcagagcgtggtagccgactgt

SEQ ID NO: 1061 - DNA, 47 bp, Homo sapiens
gctctgggcttcttgccacgcgggcgacacgcctatgatcaattttg

SEQ ID NO: 1062 - DNA, 102 bp, Homo sapiens
tacagggcctcgaactcgtcgatgcgctgcttggtgttgccctgccggatctgccgcagcgtcttgtacttgtcccggccttgcctcatgttctcgttgtgg

SEQ ID NO: 1063 - DNA, 29 bp, Homo sapiens
gtccaggggtggatttcactcccgtgtgg

SEQ ID NO: 1064 - DNA, 124 bp, Homo sapiens
ccctgtcaaccagctccgagccggcagcgaaacctgaagtggaccctgtggaaaatgaagctgtcgccccagaattcaccaaccggaacccccggaacctggagcttttatctgtagccaggaa

SEQ ID NO: 1065 - DNA, 107 bp, Homo sapiens
tctgagctccttaagtggcagggcgggattcacagctgcttacagcgagaaggggttggtttacatgagcatctgtggggagaatgaaaactgccctcctggcgtgg

SEQ ID NO: 1066 - DNA, 95 bp, Homo sapiens
agttgttgtcacgtactccaaaggttatccgtgtggtggaaataagaccgcatcctccgtgatagaattgacctgtacaaagacggtgggcagac

SEQ ID NO: 1067 - DNA, 30 bp, Homo sapiens
ggaggccagccagtcggtctaatttgaaag

SEQ ID NO: 1068 - DNA, 24 bp, Homo sapiens
gggcagtgtggggattggcattca

SEQ ID NO: 1069 - DNA, 30 bp, Homo sapiens
ggccccttggaccgagacctgcgacggctc

SEQ ID NO: 1070 - DNA, 24 bp, Homo sapiens
tgggtatcactccatatactctgg

SEQ ID NO: 1071 - DNA, 26 bp, Homo sapiens
caagtgcacagacaacaccaagtaag

SEQ ID NO: 1072 - DNA, 66 bp, Homo sapiens
gcacatacctcacgatcacgggaaacacacatgcagagaaggcgggaaagcgtggcaaagacatgg

SEQ ID NO: 1073 - DNA, 80 bp, Homo sapiens
gaccaagcctgcagtgccaccctccccagggagcaaacagaggcaggaagggcaggaaggagccgcagagcttctcaagg

SEQ ID NO: 1074 - DNA, 69 bp, Homo sapiens
ccattcccagggtcggctcctgctgactgcatgcaggcctctcaggactgggttccatacatcgcgccc

SEQ ID NO: 1075 - DNA, 50 bp, Homo sapiens
ccagtgtcacagctacacgggatactgctggtgcgtcacgcccaacggga

SEQ ID NO: 1076 - DNA, 177 bp, Homo sapiens
agattgaggttgggccagccgtccaggtccgagtcctccccgcagatgagcccgtcgcccgcgtagcctgtctggcactcgcacttgtacatggggtcgctgaagtggcccaggtagatgcactccgcgtgcttgtggcagttgtgtgtcttgtccttgcatgggttttcgggctca

SEQ ID NO: 1077 - DNA, 68 bp, Homo sapiens
cacagcaggtgtcccagtcaggctggcatcaaaaacgagtaacagatggttggccaacccacaggcca

SEQ ID NO: 1078 - DNA, 51 bp, Homo sapiens
ctcccgctgaagcgggttccaaggccaccgtgagggggaccatccatccag

SEQ ID NO: 1079 - DNA, 25 bp, Homo sapiens
atcaccgaggtccacacacttggca

SEQ ID NO: 1080 - DNA, 108 bp, Homo sapiens
tgctgtcgacacgcctcacgctgctgctgatggtggccacaccagccctgatgggagtgggcaccctgatgggctcaggcctccgaaaattgtctcgccagtgtcagg

SEQ ID NO: 1081 - DNA, 127 bp, Homo sapiens
ggaggagctagaccgcgtgctgggccctgggcggactccccggctggaggaccagcaggctctgccctacacaagcgccgtgctccacgaggtgcagcggttcatcacgctcctgccgcacgtgccc

SEQ ID NO: 1082 - DNA, 106 bp, Homo sapiens
ggcactggcgccagaggcttccttggggcggggggagggcacctcagcccctgaagacaagcagcactgcagtggcaaaaatggaaacactgacccggtgcggtgg

SEQ ID NO: 1083 - DNA, 88 bp, Homo sapiens
ctgctcaggcattcggcaggtccagcagaggtacacctcctgcagcgggttccaagtgcacctccagcctgatgggcctgaccaagga

SEQ ID NO: 1084 - DNA, 25 bp, Homo sapiens
ttagtcgggtgccaggacaatgaaa

SEQ ID NO: 1085 - DNA, 114 bp, Homo sapiens
tggtttgccctgaaggtgaggtttcttctcctcctccttccagctctgcactcgggcttcctggccagggggctccggccgaagccagttgtcacaaacgtcgaggctggcagg

SEQ ID NO: 1086 - DNA, 115 bp, Homo sapiens
gatagtggaggcttccgggctggggcgggcgagggcagcttggccgcctggactggagccttcttccctgacggctcctcctcagagtcctccgaggccctcttcacgcctgcca

SEQ ID NO: 1087 - DNA, 138 bp, Homo sapiens
gcagcaggcggatgaaggacagaaggcagtcccacagcgccccctggtgctcgctgcggaacacgtgcggctgcagcagctccagcaggcccagcacgtgcaggaagcagctcaggtggttctgctgccggaactcct

SEQ ID NO: 1088 - DNA, 105 bp, Homo sapiens
tgatgttctgctccagagtctgggggtcgtgggccactgcctggtccaggaactggaggagtttgctcatgctggacacggggatgccaaacgactgcacgaaca

SEQ ID NO: 1089 - DNA, 35 bp, Homo sapiens
tgaggtgggacttcgaacggatctgctctgctctt

SEQ ID NO: 1090 - DNA, 88 bp, Homo sapiens
gctgctgaacagccgcaaaccatcttcacctgggggcattgagtggcgcagagccgggtttcatctggaattaactggatggaaggga

SEQ ID NO: 1091 - DNA, 73 bp, Homo sapiens
cggcctccggcccgtccgagtcgccctcgccgccggccgccgaggagctgcccgggtcgcatgctgagccccc

SEQ ID NO: 1092 - DNA, 55 bp, Homo sapiens
gacagctgccccatggcggtcactgcactcgctcggacataactctcagggtcct

SEQ ID NO: 1093 - DNA, 27 bp, Homo sapiens
tgggtcaggaactcgagggcggagtcc

SEQ ID NO: 1094 - DNA, 27 bp, Homo sapiens
tccacaaacctccacccacatcgccaa

SEQ ID NO: 1095 - DNA, 90 bp, Homo sapiens
ggcaggcgcacgacagcctctaccgcgtccacatgcccagcctgtacagctgtggcagcagctacggcagtgagaccagcatcccggccg

SEQ ID NO: 1096 - DNA, 44 bp, Homo sapiens
atatggaaaatctcaccagccaggatgaggtacccagagatacc

SEQ ID NO: 1097 - DNA, 31 bp, Homo sapiens
tacttacgtgccttcatccccaacgagactt

SEQ ID NO: 1098 - DNA, 518 bp, Homo sapiens
cctgcccacatggcggctcctgccaaccctccctgctaaccccttctccgccaggtgggctccagggcgggaggcaagcccccttgcctttcaaactggaaaccccagagaaaacggtgcccccacctgtcgcccctatggactccccactctcccctccgcccgggttccctactcccctcgggtcagcggctgcggcctggccctgggagggatttcagatgcccctgccctcttgtctgccacggggcgagtctggcacctctttcttctgacctcagacggctctgagccttatttctctggaagcggctaagggacggttgggggctgggagccctgggcgtgtagtgtaactggaatcttttgcctctcccagccacctcctcccagccccccaggagagctgggcacatgtcccaagcctgtcagtggccctccctggtgcactgtccccgaaacccctgcttgggaagggaagctgtcgggtgggctaggactgacccttgtggtgtttt

SEQ ID NO: 1099 - DNA, 164 bp, Homo sapiens
gagtcccgccaagatgatattttaaaacgtctgtatgagttgaaagctgcagttgatggcctctccaagatgattcaaacaccagatgcagacttggatgtaaccaacataatccaagcggatgagcccacgactttaaccaccaatgcgctggacttgaattc

SEQ ID NO: 1100 - DNA, 64 bp, Homo sapiens
ctctctctctactccccggggtctctcctcgacccccatctcctggggtatcccccgctcggat

SEQ ID NO: 1101 - DNA, 29 bp, Homo sapiens
gatgaacagcatatactgaagggggtatg

SEQ ID NO: 1102 - DNA, 78 bp, Homo sapiens
aggcacctcttctaatgtttggaatgaagtttcactgggtttcatcgtgtaaaacaacatgcgaaatccctgggaaac

SEQ ID NO: 1103 - DNA, 128 bp, Homo sapiens
ctaatgccacgataggtgctgttagtcctgaccaactcacacaagtgcatttgcagcaaggccagcagacttctgatcaagaggtacaacctggcaagaggcttcgaagagttgcctgttcctgtcct

SEQ ID NO: 1104 - DNA, 73 bp, Homo sapiens
cgtgcagcggcttcccgtaggagcagcgttctgccgggcttgccagaccccaaactttgtccgcggcctgcac

SEQ ID NO: 1105 - DNA, 96 bp, Homo sapiens
agccgccgccacagtagatgctttcatgccatttcccaaacagccgatgaaccgcttttccactcctgtcaaacactgtgccttcaatctcatggg

SEQ ID NO: 1106 - DNA, 65 bp, Homo sapiens
cacaacgaacactcccgctccgaagccggacgtccccactctctaagtccaaggacacgccggtc

SEQ ID NO: 1107 - DNA, 41 bp, Homo sapiens
ttcctgatttaacgcgtaggggctgtaaggcgcactgaagt

SEQ ID NO: 1108 - DNA, 24 bp, Homo sapiens
gcagcgacgcgaggggcgcgcgga

SEQ ID NO: 1109 - DNA, 893 bp, Homo sapiens
accaacagtggctgcgggactttccagcacctagcctgggcattcccacagcccagagggagctcgtcccagacaaccaagaggaaaagaagggaaacaagaaagagatggagacccatcattgtggccaacgaccccacgaagagggaatagcggtccacgcacgggacccagcctccgatcaagcccagcaggcgccgggtgcgcctgtgctgggaggcagagcccacgcccacccggaaccgcgccggccagcgaggtccgtgcgcagccccggctgccgcctgcgcttctccctccacacctcaccgttagcagagggagccggctccggcctcagccagccccagagacaggcccccacagcacagcggcgggctgaagggctcctcgagcgtggccagagcagacgccgaggctaaggaggtgccgagagacagcgagggctgctagcacattgtcacctctcaatactggaactcagaataagaggtctccactgttctgagttatgggagaaagatgggtgtatggtagacagaatagtgcctccccacaacaaagatgtcaacatgttactgtgtgtgttaaaagggactttgtaggtgtgagtaagttgaagatcttgagaagaaaagattatcctgggttttttgggtggggccaatgtcataaaaaggtccagataagaaagaggcagaagagtcagggtcagaggaggagccatcatgataggagcagagaagcagagtcaggagagttgatgctacactgctaactttgaagatgaagaagccacgagctatggaatggagacagcctctgaaaggcaaggagatggatttcctttagagcttccaggaaggagtgcaggcctgctaacagatacgttt

SEQ ID NO: 1110 - DNA, 103 bp, Homo sapiens
ctccgacgcggagctgcagatcgagcggcgcttcgtgcccgacgagtgcccgcgcaccgtgcgcagcggcgacttcgtgcgctaccactacgtggggacgttc

SEQ ID NO: 1111 - DNA, 66 bp, Homo sapiens
ggaggttaaaggtgagcacttgtagaacatacagctggtgcgccatctcattgttgatggcccgct

SEQ ID NO: 1112 - DNA, 48 bp, Homo sapiens
taggcgcccggccattctatggccaccttgacgatgtccgcgggtggc

SEQ ID NO: 1113 - DNA, 56 bp, Homo sapiens
tgtcttctctttagggatggtgaggttggaaaaaggctcctgtaaccctcctccag

SEQ ID NO: 1114 - DNA, 87 bp, Homo sapiens
tgtctcaaagtcccgtccggcaggcttcctcttcttcctcctcatcctcctcttcttcagctttgagcgtgggccagttagtcagca

SEQ ID NO: 1115 - DNA, 204 bp, Homo sapiens
atctgtagggctcagcccacgggttgctgagatcatggagagcgatgggctgctgtgcaaggagcggatatagtccatgtagggattaatgtagggatgtggagggctgaagggagactcggaagcagcagtggggttccggtgtggggagatcctaatgaagggcaggtccggatacgtagggctactagataaggcggaagt

SEQ ID NO: 1116 - DNA, 87 bp, Homo sapiens
gctgcccctgtttgcctccccgtgcatggtgtggactgtgttgtcattcccagggcaggacattcctggggtaggtccgagccctgc

SEQ ID NO: 1117 - DNA, 25 bp, Homo sapiens
ggaaggcccctggtatggacactga

SEQ ID NO: 1118 - DNA, 47 bp, Homo sapiens
aggaggttgccagcgaggataacccgggagacgtgggcggcgctgca

SEQ ID NO: 1119 - DNA, 27 bp, Homo sapiens
tttctcgtctccatgggtgatgatgta

SEQ ID NO: 1120 - DNA, 66 bp, Homo sapiens
cgtaggcctcaaagtcaccgttgttgacggcctcgatgagctgctccgtggtcttaatgatctcct

SEQ ID NO: 1121 - DNA, 32 bp, Homo sapiens
cggacgggctcggcgtgcgctcggctgcgctc

SEQ ID NO: 1122 - DNA, 95 bp, Homo sapiens
aggagacagcgaaggtgggcacaaggcagaggctgagcatgaagagcccctcagggaggatggtcaggtactgctcataaaacacattggtgatc

SEQ ID NO: 1123 - DNA, 27 bp, Homo sapiens
ggaggccaggctcgtgccgttttgcag

SEQ ID NO: 1124 - DNA, 172 bp, Homo sapiens
gaattcgctcttgagcgcgcgccgcggcccgccgccctcctcggcgccagccgccagctgctcggggctgctagggcccagctgcgcgtagtgttctatgaagtcgcccagcgagtcgcggaactcggcggccaccgccatggacagcgtgaggcggctcttggaaccgccc

SEQ ID NO: 1125 - DNA, 85 bp, Homo sapiens
cagctctgatgaccggtcggcaccctcagagggggatgagtgggaccgcatgatctcggacatcagcagcgacattgaggcgctg

SEQ ID NO: 1126 - DNA, 124 bp, Homo sapiens
catcaccggcatccacaggcagttcttctccaactgcaccgtggacagggtccacttggaggaccccccagacgaggttctcatcccgctgatcgttatacccgtcgttctgactgtcgccatg

SEQ ID NO: 1127 - DNA, 24 bp, Homo sapiens
tgggggtgcgaggaatgccaggcg

SEQ ID NO: 1128 - DNA, 117 bp, Homo sapiens
caccctcacgtgacccatgcccatggtggggggctggtttctcccctcccctagggggttccggccctcatggtgggcagacttctgctggggcgatattggcttggggtctgcttg

SEQ ID NO: 1129 - DNA, 111 bp, Homo sapiens
tgatgcttggccttccgtgctggtccagcccgccccatccgccatctgggacttctgggaggcgacaacgccttcctgcggcagctgcagtagggtctccttcgccctcga

SEQ ID NO: 1130 - DNA, 112 bp, Homo sapiens
gaagccacgtgcaaggacacctgccccccactcatgctctacaaccccaccacgtaccagatggatgtgaaccccgagggcaaatacagctttggtgccacctgcgtgaaga

SEQ ID NO: 1131 - DNA, 77 bp, Homo sapiens
caggcttggcctgaaaacaggacggacctccatgcctttgagaacctagaaatcatacgcggcaggaccaagcaaca

SEQ ID NO: 1132 - DNA, 30 bp, Homo sapiens
ccagggcctccaccgaacgctctcttgaga

SEQ ID NO: 1133 - DNA, 183 bp, Homo sapiens
agggccgccggaaagccgaaggtgggtccgggaggcctgaacgcagggaagcctggggcctacaacggctgccaggagctgggcaggagctgggccgaacgtggttgtcgtgaggcaggagctgggcccgtggaggtggccgggagagctgggcctggagaggccgacgggaaccagttctgg

SEQ ID NO: 1134 - DNA, 54 bp, Homo sapiens
gggtcacaagggagatgtccgcccccagtcgtagcctcggacggtttctgagcg

SEQ ID NO: 1135 - DNA, 197 bp, Homo sapiens
acttgatcgcggtagccggcttcgtgctcttcctggccaagtgccggcccatcgcggtgcgcagcggagacgccttccacgagatccggccgcgcgccgaggtggccaacctcagcgcgcacagcgccagccccatccaggatgcggtcctgaagcgcctgtcgctgctggaggacatcgtgtaccggcagctgaat

SEQ ID NO: 1136 - DNA, 72 bp, Homo sapiens
tgtggacctggtactgaggagcaagactgtccagttctcctccacatctcccatcccagaatcaggatctgg

SEQ ID NO: 1137 - DNA, 193 bp, Homo sapiens
aaggcagtaagaacggaagcggtgaggggtgcagctgaagaccgccagggctgcaccccacttaatggctttcccctcatgccttgggggggtctccactgggtggaggaaggaagccagggtgggatggaaagccccctcttctgtggcaaccctgaagtcagcctcttggaactgagggttgacctcagca

SEQ ID NO: 1138 - DNA, 40 bp, Homo sapiens
aagaactcggggatgagaagtcaacatctgttgagtcctg

SEQ ID NO: 1139 - DNA, 27 bp, Homo sapiens
gcggagctcctgggttcggtccttcat

SEQ ID NO: 1140 - DNA, 30 bp, Homo sapiens
gcagtggtgccggctcagctcgttgcagcc

SEQ ID NO: 1141 - DNA, 25 bp, Homo sapiens
cccggctttggtgtcggagtcggag

SEQ ID NO: 1142 - DNA, 45 bp, Homo sapiens
gccgctgggctcggaggactcggagtcggagggcttggagttcca

SEQ ID NO: 1143 - DNA, 30 bp, Homo sapiens
caagctgttgcaattctaccccagcctgga

SEQ ID NO: 1144 - DNA, 45 bp, Homo sapiens
agcgagcccggctgctcgtggagagcgtgcggaaagagaaggtgg

SEQ ID NO: 1145 - DNA, 102 bp, Homo sapiens
ctattctggccgtggcagtttcaatagcagctgaagtggccgccatctccttgtccaccaggtcccccagctcctcctgcttgatgtccagtcccctgggca

SEQ ID NO: 1146 - DNA, 106 bp, Homo sapiens
tcatcgtgttctacggctcccagacggggactgcagaggagtttgccaaccgcctgtccaaggacgcccaccgctacgggatgcgaggcatgtcagcggaccctga

SEQ ID NO: 1147 - DNA, 1445 bp, Homo sapiens
gcgggccacgttcacagatagacagattcacccgaaatgagaatgagggccttaaggctgccgaaaacaaatgggtggaaatagcaacgttgtttccgtcaattccaaatgtgcactggctgcgtgagacaagccaatctccaattcctatgcttttttcattaaaaagaaaaaactatctcgagaggaaaaagttctggtcaaataggagttcagtgtttgttatctggtaacagtttttttatcttcctacaattacttggggaaggagtgtcttcggggaggaaaaactgacacactgacaaggctcccgaaattggacagaatggttaaggatatagctcttccttttgggtttttctaccagtaggcttctagcacctgaattttcacacactgcaccacagaccttctccaaacgcctctccgaccccacagcttctgcacccagctgcgtccgccagcacgaggcgcagtaggaaacgccccagtgcagagtgggtgacggcagtgtgatccctgaggagggagctgcagcagcttcagaagcgggatgttctctgaaaataccaacacgatccatgacatacagacctgaattttctctatttttgtggcgtttcacgtttctctcaagaggattaataattttggtggtggatttacgttaagaggaaagaaggaccaaaaaaaaaaaatcccacagccacctgacctgaagtcgctttcattctcatttagcctaggagaccgatcaacagcaaaaccaacctggataaggctgaataaggatgttaaagcccaaacaactagcaaaggaaaagtacacaatcgatggcttgatgttacatatggctgtaatgtagaaatactgtaaactgcaatttagtgttaatactgtcaactaatcagagacttcggaaaactggcaaggcctaaaccataaggatgaatgagacctcaggttctaagtctgtcagtctgggatttacactgttccatgtctgtaggctacaccctggaaaacatgcagagccgagacagatgagatagaaagtacccaaaacgagagacgagagcgtatgtacataaaaatccttactggaaccacagaacttactgaatgagggccattcctctttaagttttcttttcatctgaaaaccctattatctagcaataagttaaattagagacagacagctccacttgcatgaatctacagaacagtccagacgccagtgtgaggctgctattccaataccagcacagctagcctgactttccactagtggtattttggcaaaaatgtcaaagaggcgatcaaagacaggacaggtcgtgggtttctccctgggaaggtcatccctccctttccctcccccacccgacccccaactcatgggaaaaaaataaagactgcagtagtagcatccgcgtgcgct

SEQ ID NO: 1148 - DNA, 47 bp, Homo sapiens
gtggagccagccatcctgagacgtccgtacagcccgtactggtggag

SEQ ID NO: 1149 - DNA, 30 bp, Homo sapiens
accctgggggcagcctcacctagggctgca

SEQ ID NO: 1150 - DNA, 196 bp, Homo sapiens
agtccgacagagggtactgcctggtgtcgggggagtgctgcctgtagtccagtaggggaggctgcctgtagtccaagggtgggggctgctggtagtcccctcctgggggttgcctgtaatccagcgggggctgcctgtagtctgtgaatggaggctgtcggatgtctggtttcacatcttgccttgctttcacttc

SEQ ID NO: 1151 - DNA, 25 bp, Homo sapiens
ctcccccgaggattctgaagccaaa

SEQ ID NO: 1152 - DNA, 32 bp, Homo sapiens
tgctgtgtcgaggccgagcttttgtctttgat

SEQ ID NO: 1153 - DNA, 55 bp, Homo sapiens
tgtgtgccgagaagcagtaaatgattgtgatattcgtgaaacgtgctcaggaaat

SEQ ID NO: 1154 - DNA, 29 bp, Homo sapiens
cattacaaaatgtggtggcttgagtaaca

SEQ ID NO: 1155 - DNA, 24 bp, Homo sapiens
actgaggttagagccatctggaaa

SEQ ID NO: 1156 - DNA, 24 bp, Homo sapiens
atcaaatctctcatgacccgacag

SEQ ID NO: 1157 - DNA, 36 bp, Homo sapiens
ggctccaaaggagagagcggtaacaagggtgagccc

SEQ ID NO: 1158 - DNA, 82 bp, Homo sapiens
gttggggacccatataggactccatcactatatggtgtcctttggatatatcgaagccatccaggtcggtctgggtaaccca

SEQ ID NO: 1159 - DNA, 74 bp, Homo sapiens
atgtctccctcctcgaaatcagtgagcactcccagtgaagctggaagccaagactcaggcgatctggggccatt

SEQ ID NO: 1160 - DNA, 30 bp, Homo sapiens
acaaaatccttcatcgttttggacccatgg

SEQ ID NO: 1161 - DNA, 33 bp, Homo sapiens
aggtgctctccgtgagccggttcacctcctcgg

SEQ ID NO: 1162 - DNA, 191 bp, Homo sapiens
ggcgtctgtagtgaacctcgcacatcagggtttcgaagccgctgtgcctgaagtctttgatcttgacttggggactccacgaacctgcaattccctcctccagcagcagcaccggtgctatctgtgtaaggggctggttcctccatgaagcagctgagcggcctcccaggcccggagtcttcatacaccgt

SEQ ID NO: 1163 - DNA, 175 bp, Homo sapiens
ccgtattgtgacctgcggcacagaccgcaacgcctacgtgtggacgctgaagggccgcacatggaagcccacgctggtcatcctgcggatcaaccgggctgcccgctgcgtgcgctgggcccccaacgagaacaagtttgctgtgggcagcggctctcgtgtgatctccatctgt

SEQ ID NO: 1164 - DNA, 54 bp, Homo sapiens
gcgcctcgaactgacaccggaaccggaaatagcttgggctcgacttcttcctcc

SEQ ID NO: 1165 - DNA, 76 bp, Homo sapiens
tgaaaaagctaactccaaaacagaaattttctgaagatttagagtcatataagatatcagtggtaatgcaggaatc

SEQ ID NO: 1166 - DNA, 60 bp, Homo sapiens
cctcatgagggtagtcccagagaccaggcgatggcatctgcactattcacagcggattcc

SEQ ID NO: 1167 - DNA, 24 bp, Homo sapiens
tgttcatcttcacaatccgatggg

SEQ ID NO: 1168 - DNA, 57 bp, Homo sapiens
ctccaccaagtcccggacagcagggctgctggggctgctcttgcgggagaggggccg

SEQ ID NO: 1169 - DNA, 39 bp, Homo sapiens
tccagcgaggcgtccgctgccatgcgagagtctccgcac

SEQ ID NO: 1170 - DNA, 106 bp, Homo sapiens
gtgtgaaccagaaaggagccgctgtcctccaccaggcctcggaaggtggcctcagtctccctgatcagcctctgctctgtctcactggaacagcaggtgtactcct

SEQ ID NO: 1171 - DNA, 115 bp, Homo sapiens
cacaaccggcctcagggtcacacagggcaaacgacgctcagactcttggcacataagtctggagactgctgtgggggtggcagtggctgtcactgtgctcggaatcatgattttg

SEQ ID NO: 1172 - DNA, 112 bp, Homo sapiens
ggaggcttcaaacatccggccttcaagaggcgcaggcgggtgaattcggactgtgactctgtgttaccctccaacttcctcctggggggcaatatctttgatcccctgaacc

SEQ ID NO: 1173 - DNA, 29 bp, Homo sapiens
ttgccaagcccgtctaacccatcggaaga

SEQ ID NO: 1174 - DNA, 211 bp, Homo sapiens
ccgcgagcgtgacgggaagctgctggaggtgatcgagcgcaagcgctgcgtgtgcaaggagatcaaggcgcgccaccgcccggaccgaggcctctgcaagcaggagagcatgcccatcctccccagctggcggcggggacccgagccccgcaagtccggcaccccgccctgccgccggcagcacacggtcctctgggacaccgccatctga

SEQ ID NO: 1175 - DNA, 29 bp, Homo sapiens
cccgagcgcaggacggtaccgccgtgtcc

SEQ ID NO: 1176 - DNA, 357 bp, Homo sapiens
cgaacccctacaaatatagatcctctctacaaaatagagataatttagcccccccatagcagctgttggggggggaaggggagggcacaggaggaagggggagactccagctcctgccacccctcacggggtacagagggcaggggcagggccggcggggacatgaaggcaccgtcagcactgagaggtggggactcgtggggctactggagggaggccagaggctgggggcccagggtctgggggcaccagagtggggcctctgaggtcagtgtctgtgaagggggtgcactagtgtctttggttggggctgaaggcaccgcaggtggggtcgggtggagcagggaccttataaat

SEQ ID NO: 1177 - DNA, 119 bp, Homo sapiens
ttcttgctgacggggattgtgtctgtggccttcctgctgctcccactcccggacgaactcggcagccagctgcctcaagtcctgcacgtctccctgggacaaaagttggtggccgccta

SEQ ID NO: 1178 - DNA, 137 bp, Homo sapiens
tggggggtttgagcgcctggagctgctgcaggaatgccgtgagctgctgctgctgctgctgtggcggcggcggtggtggcggtgtcaggtcccccagagctgccttttctcggagcgcgcactgtgggagctggcgg

SEQ ID NO: 1179 - DNA, 104 bp, Homo sapiens
gactttgaagacaacgcccatcccttctgtgactgggtccagacttccggggatggtggacactgggccctcggacataaaaatggacccgtccatggcatggg

SEQ ID NO: 1180 - DNA, 81 bp, Homo sapiens
cggccccacgagcttcacagctgagaagtggtcctggagctgcggccaggagtcagcgatgtggggttcatggaagacctc

SEQ ID NO: 1181 - DNA, 159 bp, Homo sapiens
agaattgaggaagcgcttccccgtgcccacctcagggtactgctccgccagcccccactcgggccagcagaagctctctgcagagaagagcaggcggctgccactctggacgaacttcttcagcagctctgtggggctgccggccagaatcacgtcgta

SEQ ID NO: 1182 - DNA, 136 bp, Homo sapiens
ggccgagggccctaactacctgacggcctgtgcgggacccccatcgcggccccagcgccccttctgtgctgtctgtggcttcccatccccctacacctgtgtcagctgcggtgcccggtactgcactgtgcgctgt

SEQ ID NO: 1183 - DNA, 42 bp, Homo sapiens
cctcctcactgaagcggtctgcctgggtcataagtttttctt

SEQ ID NO: 1184 - DNA, 35 bp, Homo sapiens
tccactccgtgacatcgctccaggacccgctgcag

SEQ ID NO: 1185 - DNA, 113 bp, Homo sapiens
agcgcttatttggggagaccatcttagggctcacccaaggctctgtctctgacctccttgcccgccccaaaccctggcataagctcagtctgaaaggacgagagcccttcgtc

SEQ ID NO: 1186 - DNA, 24 bp, Homo sapiens
gccgctgagcaccgcctggagaag

SEQ ID NO: 1187 - DNA, 81 bp, Homo sapiens
cagccgcctcctcggtgcgaccaccgaggcccaagaaagagccgcagacgctcgtcatccccaagaatgcggcggaggagc

SEQ ID NO: 1188 - DNA, 39 bp, Homo sapiens
gctctgaaagtggtgacgaaaggaagaacctcgaggaga

SEQ ID NO: 1189 - DNA, 24 bp, Homo sapiens
ctcagtaactgcaggaggacaatt

SEQ ID NO: 1190 - DNA, 24 bp, Homo sapiens
cggaaccggccggcgcgcctggcc

SEQ ID NO: 1191 - DNA, 118 bp, Homo sapiens
ccgccaccacacggagcagacgcgcgccgggagccgcgggccgggccagccgggccgccggggcccagtgcgccgcgctcgcagccggtagcgcgccagcgccgtaggcgctcgctcg

SEQ ID NO: 1192 - DNA, 24 bp, Homo sapiens
ccgcggacgcaggggcgttcaatg

SEQ ID NO: 1193 - DNA, 128 bp, Homo sapiens
cggaagttcgacggcgccgggcgagtggctgttgagcggcgccgcgggagttccgcaggtttcccgtgttcgcagcggagccggaggccagctgaacccggccgtgggatcccggataggaggaggag

SEQ ID NO: 1194 - DNA, 40 bp, Homo sapiens
ttcactgcatattctccccacagatagaagagcccagcca

SEQ ID NO: 1195 - DNA, 94 bp, Homo sapiens
cacacttggtcatccgggtgacatgggaggtgtcgtagcctctcccacagcacatgacttcacagctgtccatgccccgggaagtcaggttgca

SEQ ID NO: 1196 - DNA, 113 bp, Homo sapiens
gaggcacctggtctacaggatgaggcactaacggggtttatggaagagcaaaaggcaatggtggtaggaatgacaagggaactgtctgaacatgcaggttggttcagtccggg

SEQ ID NO: 1197 - DNA, 24 bp, Homo sapiens
ggtctcattactcatagcaggagc

SEQ ID NO: 1198 - DNA, 45 bp, Homo sapiens
tagcagaagcagtagccgcgacatgcgggcgagaagcgcgcccgg

SEQ ID NO: 1199 - DNA, 28 bp, Homo sapiens
ttaagttgattcaggggtgtatatatat

SEQ ID NO: 1200 - DNA, 24 bp, Homo sapiens
gggaagttctctctgggaacatct

SEQ ID NO: 1201 - DNA, 76 bp, Homo sapiens
agtttccaccccattgacaggcttggagtcttgagtaccatctgggtgggtggagctggcactggcacgaaacctc

SEQ ID NO: 1202 - DNA, 31 bp, Homo sapiens
tcctggaggatgaacggctagccagcgccca

SEQ ID NO: 1203 - DNA, 96 bp, Homo sapiens
ggcacatgccttgggctcgcagctcacgctgccctcccagcaaaggcagaggtggcaggcagcagtgggcgatgggaagcgctccccgctggcaaa

SEQ ID NO: 1204 - DNA, 94 bp, Homo sapiens
ccgaaggcgtggatgaagccgatccggccaagtggaaggccaacctgcgctgtgcccttaacaagagccgggacttccgcctcatctacgacgg

SEQ ID NO: 1205 - DNA, 76 bp, Homo sapiens
gatcgtggtgggtgtcctcatgttcctgctcaccttctgtggctgcattgggtccctccgcgagaacatctgcctc

SEQ ID NO: 1206 - DNA, 44 bp, Homo sapiens
gggcccggattctctgggcgcacaggtcgcctgagccgcctccg

SEQ ID NO: 1207 - DNA, 25 bp, Homo sapiens
ccctcttccggggcaatcccctcat

SEQ ID NO: 1208 - DNA, 94 bp, Homo sapiens
tcctgttggacaaagagaatgaagaaatgctttttaataggagaagagaacggagtggtaacttcaattttggggcctaccataccctggaaga

SEQ ID NO: 1209 - DNA, 24 bp, Homo sapiens
ggcggccgctacggtgctgacaag

SEQ ID NO: 1210 - DNA, 65 bp, Homo sapiens
tacacagacagcacgaggcagcccggcaagctctaatgggaaggatacgccctgatcacacactc

SEQ ID NO: 1211 - DNA, 71 bp, Homo sapiens
atttgcgtagggtcacgacgagcgtgacggtgagggaggcgcattctgtggtgaggataaacacaccccgg

SEQ ID NO: 1212 - DNA, 25 bp, Homo sapiens
tgaagaaaacagcaatccccatgac

SEQ ID NO: 1213 - DNA, 159 bp, Homo sapiens
tctggtgctgtaggccagtcactggatgtctgtggggagctggggaaaggaggaagcccacttgggatagggttgggatggcgaaaattgtctgagaataacgactgtgactctgttactgccccttcaaaaggggaccgtgcactgtgattggatgaa

SEQ ID NO: 1214 - DNA, 163 bp, Homo sapiens
gctggtctcattcgagataatgaaatggggaagatccacatccggcctggactccagccctgacaccctgagcagggaggaacctctatcccagccccccagctccccagccgagcccgggctggatgactcctctgggggagaatgttcctcgtagatcagc

SEQ ID NO: 1215 - DNA, 101 bp, Homo sapiens
agtcattcgttgcccagtttgcagccaagaatgtgcagagagacacatcatagataacttttttgtgaaggacactactgaggttcccagcagtacagtag

SEQ ID NO: 1216 - DNA, 56 bp, Homo sapiens
ggaagttctgcacggtgctctgtttctgggagagccggaggagctcctcgcggatt

SEQ ID NO: 1217 - DNA, 57 bp, Homo sapiens
attggctggcttggtgacagaagaaggagtggagaggcgtcggatgggaaaggaatc

SEQ ID NO: 1218 - DNA, 26 bp, Homo sapiens
actccaaaaccgcctcctcttccact

SEQ ID NO: 1219 - DNA, 25 bp, Homo sapiens
gcatcgcagacatcgatctcgctcc

SEQ ID NO: 1220 - DNA, 259 bp, Homo sapiens
cttctgaaagccaccgagacctcaggcccaacctacatcaaactgggccagtgggccagcacccggcgcgatctgttttcggaggctttctgtgcccaattttccaagctgcatgtccgagtgacgccccacccgtggactcacactgagcgcttccttcggcaggcttttggggatgactgggggagcatcctctcttttgagaaccgggaacctgtgggctcaggctgcgtggcccaggtgtacaaagcatacgcca

SEQ ID NO: 1221 - DNA, 76 bp, Homo sapiens
tgtccgctctgactcggctggcgtctttcgctcgcgttggaggccgccttttcagaagcggctgcgcacggactgc

SEQ ID NO: 1222 - DNA, 70 bp, Homo sapiens
tcctttctcgctgaggtcctggagatttctgtaaggctttcacgttagttagtgagccaggtaatgaggc

SEQ ID NO: 1223 - DNA, 27 bp, Homo sapiens
aaagaactggaataaccccttgcagaa

SEQ ID NO: 1224 - DNA, 26 bp, Homo sapiens
acaatggagaggaaaccaaccaccca

SEQ ID NO: 1225 - DNA, 27 bp, Homo sapiens
gggcagagctcgccccacaaagaagaa

SEQ ID NO: 1226 - DNA, 74 bp, Homo sapiens
gcgccgtgtcgcacgcagctccaggcggggcagccccggtagctgagggacgcagctagaccttggcgggacgg

SEQ ID NO: 1227 - DNA, 72 bp, Homo sapiens
catcagctcgtctgaacctcttgagctgtctcagtcgcatgtactctgattttacacgcttccgccaacaaa

SEQ ID NO: 1228 - DNA, 489 bp, Homo sapiens
ggaccctggatcatgcccctttgcccccagcccttggtttgcagggaggccgcctggcgatgcccagcctgaaacagcacccctggcagggctgctcagtggcagctctcactttgtgctcaacaggaagcaatcagaaacacataccagaagccaaatctacgccaacaatttctcagacaacgaaaaagcaaagagcaaaatcaacatgatttggaaaaggaattttaaaccttaaattaaaaaaagaaaacattttcacacagaagaattatctgctttgagaaataaagaaattagaaggtgtaaaaaaaaatttttcaaaccccaaataatgataaaaatagatgtatcctctgtaaaaatctggactaaactattcagtcattcatggttattcagtattcagagcatgaagtgaaacaccaaagtataaaaaattaaaaaaaaaaaaaaaggaatccgagatactgtcgtttgttgccggcc

SEQ ID NO: 1229 - DNA, 29 bp, Homo sapiens
cggcccggcagacgaaggcccgtgaggct

SEQ ID NO: 1230 - DNA, 32 bp, Homo sapiens
cccgcggcccagataaagtcgtcgccgctgct

SEQ ID NO: 1231 - DNA, 67 bp, Homo sapiens
ctgtattcaccctggactgtgccaaccagtgcccacacagctgtgccgacctctgggaccgcgttca

SEQ ID NO: 1232 - DNA, 24 bp, Homo sapiens
cacctccaaagtcaaggcccggga

SEQ ID NO: 1233 - DNA, 35 bp, Homo sapiens
ggcccggtggagatgccgtcgaccgccccttccag

SEQ ID NO: 1234 - DNA, 35 bp, Homo sapiens
gaagagggtcgctctccggccattctcccctcacc

SEQ ID NO: 1235 - DNA, 24 bp, Homo sapiens
tcttgttgtactcggccccagagg

SEQ ID NO: 1236 - DNA, 121 bp, Homo sapiens
cccagaaggtagtggccttgcgaaagaagcagcaactggccatcgggccctgcaagtcactgcccaactcgcccagccactcggccgtgtccgccgcctccatcccggccgtgcacatcaa

SEQ ID NO: 1237 - DNA, 42 bp, Homo sapiens
cagggatgggcacttcacgcttcccaatagcagagagcagca

SEQ ID NO: 1238 - DNA, 79 bp, Homo sapiens
gaaaggcagccgttgccttccgtcaggagccctatgtctcagttcaatatatgcttggcccagtatgttgtgctgctga

SEQ ID NO: 1239 - DNA, 60 bp, Homo sapiens
aggactatgaagagtacgggcccagcatctgccgccacaaccccgtctttggagtcatgt

SEQ ID NO: 1240 - DNA, 29 bp, Homo sapiens
agcgcttcggggaaatccgtgcagcagca

SEQ ID NO: 1241 - DNA, 85 bp, Homo sapiens
cctggacaggctcgaatccagtgaaaagcacaaaaggggtcaattctggagttagctttttagtgggaggtggtacgtcttcaat

SEQ ID NO: 1242 - DNA, 32 bp, Homo sapiens
ggtttttaatggtcccgtggatcattttgatg

SEQ ID NO: 1243 - DNA, 71 bp, Homo sapiens
tggaaacggccacagattctgacacggagagccgcggtctgcgggaataccactctgtcggggtgcaagtg

SEQ ID NO: 1244 - DNA, 104 bp, Homo sapiens
gcccgacagacaacgccaggaagcccggaggcgcctcatggccgccaagcgagcggcgtccttccggcagaattccgcctccgagcgcgcggacagcatcgaga

SEQ ID NO: 1245 - DNA, 84 bp, Homo sapiens
taacccgtttaaaggagcactatgagaaaaagatgagagatttgatggcaagcacggtgggcgtggtggagattcagcagctca

SEQ ID NO: 1246 - DNA, 163 bp, Homo sapiens
agacaggtttgctcggattccacctgccgtctttggtacagcgaatagtggcggatgtgactgcttccatgacatagcctgggttacactgatagctcacagtcttgttgaaggtgaagtcggtcccaaactggatgccatttgctagtgtgcctggatcccc

SEQ ID NO: 1247 - DNA, 121 bp, Homo sapiens
agacatcgagtttcgctgccgctccagagcccatttgccaagcactctctgacatgagaccccacaagcgtgtagccggtgttgcacgtaaatatagctgtggccccataaactgtcaacg

SEQ ID NO: 1248 - DNA, 164 bp, Homo sapiens
atggattatgatgggcggcctcactgtggtcttgatgactctaagaatatcgcccgaatagcagttcgaatgcttcaggatgggtgtgaactccgaatcaacgagaaaatgcatgcaggacagctaatgagtgtgtcctcttccttaccaatagagggcactcc

SEQ ID NO: 1249 - DNA, 24 bp, Homo sapiens
ctgacgatatcagagctttgctga

SEQ ID NO: 1250 - DNA, 112 bp, Homo sapiens
ggctgaggcgtgtccctggcctcttcccccaggctggcagccccagattttgagcaggagtcggatgtgtggggaggtatgggggccggcgagcatgtcctggaccccgcgt

SEQ ID NO: 1251 - DNA, 274 bp, Homo sapiens
gctatagcttcatcgatgctctgaaagccttccagcttgccagtggacaggggtctggcaccttggctggcactcctggcagaaggggggtgctgcccagcctctctcagggggagcaagggctcctgccccccacgctccccctcctccaagctcgcctgtggctccgcagccggcctcgggaagggccaggtatgctcctccagcctggcctgccattccaggtaggagggcctgcgggtctccagcctcagtttctcggtgagggccttca

SEQ ID NO: 1252 - DNA, 29 bp, Homo sapiens
tcatcgccatctgtcccaccggacacccc

SEQ ID NO: 1253 - DNA, 24 bp, Homo sapiens
tgctgattctctgctgtcaaactc

SEQ ID NO: 1254 - DNA, 69 bp, Homo sapiens
cacgaggggatcatccacagcctggtcctgcgcaaccttgagggccgcccttacgtggcctggggctca

SEQ ID NO: 1255 - DNA, 84 bp, Homo sapiens
ggccgctggacttggccgactacacctatgacctggcggaggaggacgactcggagcccctcaactacaaagacccctgcaagg

SEQ ID NO: 1256 - DNA, 32 bp, Homo sapiens
gcccgccagcgctactccgcacctgccaccct

SEQ ID NO: 1257 - DNA, 80 bp, Homo sapiens
caagaaacgcaaacagcgggctggtggagagccctggggtgctaagaagccaaggcatgacctgcctccttaccgggtcc

SEQ ID NO: 1258 - DNA, 125 bp, Homo sapiens
ccataaccgtttctcagccactgaagtaaccaataagacgctggcggcagagatgcaggagctgcgagtccggctggcggaggccgaggagaccgcccggacggcggagcgacagaagagccagc

SEQ ID NO: 1259 - DNA, 80 bp, Homo sapiens
ggccgactggtgtctccaccacatctgcaccaactacaacaacgtgtgccgcaagttcccccgagacatgaaggccatgt

SEQ ID NO: 1260 - DNA, 713 bp, Homo sapiens
gcagaatcgactccaatgcctttcaggaaaggactcggcacttctctgactgcggaggccctgaccctgccagctggctccgagggcaacacaggggcctggcctctagagggctggtgattgaggggcccgggctggcggcaaagaggggtttggtctcggggcttaaatggcaccagactcttgcttttgcccatctggagactgcaggctcccttccttaccctcagagagtgcttatggtgggtgtttttgcggggctgcaataggggccaaaagtcagggaaaggggcactgacctgtagtgaaaggccacaggacacagccttattactgctggggtgggataaggggaaggagaagagggagaatggagcaggaggaaaagcagagttggtctagagaggaggagggcggggctggaggaatgtgggggattgaaactagctcccagcccccatggggcagcagctgggccacaattgcccctttccgttttctaaccccgactcagatttcaccacccacactctttttaggtgtaaaagatggagtcccacggaggaggggcagagccaggaggcagtggggctgtgggctcagagctcaggagtcgccttacctgagagagatgttctagctgagagggcctggccctggggtgggctccaggaaaacgctggttaggcctgggattgagctaacctgaaaca

SEQ ID NO: 1261 - DNA, 25 bp, Homo sapiens
ctgtccacacgctcagggtccccac

SEQ ID NO: 1262 - DNA, 71 bp, Homo sapiens
cgatgaagacgacgaacttaaggatcttggggtccaggagccatggtctggttcccgacgctgtcctggct

SEQ ID NO: 1263 - DNA, 37 bp, Homo sapiens
tgtaaagaagaagcccgccgggcatgccgagcaggaa

SEQ ID NO: 1264 - DNA, 80 bp, Homo sapiens
aagccaaacatgccgcagaccacgcgggaattcttggccgtccagtgcttgtcacagatctgcttccaggtcttgccctc

SEQ ID NO: 1265 - DNA, 386 bp, Homo sapiens
aatcagctgcatccggacggtgtggaggaccgaggggttgggggccttctaccggagctacaccacgcagctgaccatgaacatccccttccagtccatccacttcatcacctatgagttcctgcaggagcaggtcaacccccaccggacctacaacccgcagtcccacatcatctcaggcgggctggccggggccctcgccgcggccgccacgacccccctggacgtctgtaagacccttctgaacactcaggagaacgtggccctctcgctggccaacatcagcggccggctgtcgggtatggccaatgccttccggacggtgtaccagctcaacggcctggccggctacttcaaaggcatccaggcgcgtgtcatctaccaga

SEQ ID NO: 1266 - DNA, 41 bp, Homo sapiens
tcgttggtggcatcttccgccgccaggcgcaggtcgcggat

SEQ ID NO: 1267 - DNA, 43 bp, Homo sapiens
tctggaggtcactctgacccctgaagtagagctccggaaagcc

SEQ ID NO: 1268 - DNA, 59 bp, Homo sapiens
tttgaagaaaagtgcggactgggtatcagactggtccagtagacccgaaaacattccac

SEQ ID NO: 1269 - DNA, 73 bp, Homo sapiens
aagtactgagtgtgatccgggatattggcgccatagcccaagtccacgcagaaaatggcgacatcattgcaga

SEQ ID NO: 1270 - DNA, 88 bp, Homo sapiens
gtatgaattctgttggcgggtgctggaaggccgggctatggaagtggatgtccatggcctgctgagcctcgtgtatcatctcaaggaa

SEQ ID NO: 1271 - DNA, 30 bp, Homo sapiens
ttcattaggtacacatttaccccagtacca

SEQ ID NO: 1272 - DNA, 24 bp, Homo sapiens
cctggtggacctgattctgatttt

SEQ ID NO: 1273 - DNA, 43 bp, Homo sapiens
ggaaggggcgctcctcccagctgtaccggccactgcaacccat

SEQ ID NO: 1274 - DNA, 27 bp, Homo sapiens
ttgttgctgcctagactgtatgatgga

SEQ ID NO: 1275 - DNA, 74 bp, Homo sapiens
taggccagagccccctacattcttgcctccgcggccgcggccgccgccgcctccccttcgcctggctctttcca

SEQ ID NO: 1276 - DNA, 108 bp, Homo sapiens
gctgagcgcctttcccagggaggtggggggcgccggggcagggctgcaccccgtggtatacccctgcacggccttgctgctgctctgcctcttcgccaccatcatcac

SEQ ID NO: 1277 - DNA, 76 bp, Homo sapiens
agccttggcgccttctacatccctgtggctttgattctgctcatcacctggatctatttcctgtgcgccgggctac

SEQ ID NO: 1278 - DNA, 41 bp, Homo sapiens
tcctccggctggatgagtctctggaacggggggagcagctc

SEQ ID NO: 1279 - DNA, 46 bp, Homo sapiens
gcactgctgcactcatcgcactgatgccacggacactcccactttc

SEQ ID NO: 1280 - DNA, 134 bp, Homo sapiens
ttgcatgcacgtaatcaaaacgggcaaaagacatttcttcatcaagttttctggggttcggtttcaccctgctgacccctttccaagccaattaaactgaagcacagcaggtcaaacggacagccaccaaaatg

SEQ ID NO: 1281 - DNA, 29 bp, Homo sapiens
gagctgaattccggaagatccccacatcg

SEQ ID NO: 1282 - DNA, 118 bp, Homo sapiens
gcaccacttgggtgaaggtgttcttggcctcctgcacctgctcttcttggccttgctgcctccggtccctgtcggcctgggagctctcagcctcgggctgttctgtccacgtgtgctc

SEQ ID NO: 1283 - DNA, 87 bp, Homo sapiens
ccggcgccttgtctgcacactggaggtcctccattacagaggcccagcgcacatcgctggccccacaaacgttcaggggtacagcca

SEQ ID NO: 1284 - DNA, 24 bp, Homo sapiens
tggtttcataagagcctgagagag

SEQ ID NO: 1285 - DNA, 110 bp, Homo sapiens
tctcagtgtcgctgcgctcggttggattccctcgcttcttttgtagctttggccaacagttacagtgatggtggcctccctcgggggtgactagtgtgcccgttttgttg

SEQ ID NO: 1286 - DNA, 54 bp, Homo sapiens
gtttcccgaccagtccctgggcgccaactagagtatggactgaccaggtacctg

SEQ ID NO: 1287 - DNA, 53 bp, Homo sapiens
ggcacagttaggtcgtgccctgataagggggtacacaaggggaactccaggca

SEQ ID NO: 1288 - DNA, 25 bp, Homo sapiens
catagtcctggctcggctctgtcat

SEQ ID NO: 1289 - DNA, 24 bp, Homo sapiens
ccagtgcccaactcattctcatac

SEQ ID NO: 1290 - DNA, 47 bp, Homo sapiens
gccaactacctcaggaaccgggagtgaaactactggggttgccattt

SEQ ID NO: 1291 - DNA, 74 bp, Homo sapiens
gagtttgatttcttgcagtcctgagcgatggagcccgggggtgcctggttattgtccgctttctctctcagatg

SEQ ID NO: 1292 - DNA, 28 bp, Homo sapiens
aactgcctcattgggagccaggacttgt

SEQ ID NO: 1293 - DNA, 44 bp, Homo sapiens
cgagccggggttgcggcctcggcggagtggtggctactgctgct

SEQ ID NO: 1294 - DNA, 48 bp, Homo sapiens
ttgacaatattcaaagttcccttttttccggcagtcacctattactaa

SEQ ID NO: 1295 - DNA, 80 bp, Homo sapiens
catttggaactccccgtgaggaggtcgaggcgcacagggcaagcaggaagaggcgagggcacttgggggtcattatttga

SEQ ID NO: 1296 - DNA, 29 bp, Homo sapiens
actccagccggggtgacaagagcaaaact

SEQ ID NO: 1297 - DNA, 27 bp, Homo sapiens
ccctcaacaaggccggcgacagcagca

SEQ ID NO: 1298 - DNA, 85 bp, Homo sapiens
ccctcctgcaaaacggcccaactacgttaagcttggcactctggcacctttctgctgtccctgggagcagttaactcaagactgg

SEQ ID NO: 1299 - DNA, 117 bp, Homo sapiens
aacggagcgatcagagtaatgggagcaaatccataggctgcaaagttccccgtctctcccacggccatcagcaggacaccaccccaccacagcacactcttgaagtatggccttggg

SEQ ID NO: 1300 - DNA, 25 bp, Homo sapiens
aggggacgcggcggtactctggcgt

SEQ ID NO: 1301 - DNA, 88 bp, Homo sapiens
gggagggccccatgacctacctcaacaaaggacagttctatgccataacactcagcgagaccggagacaacaaatgcttccgacaccc

SEQ ID NO: 1302 - DNA, 71 bp, Homo sapiens
cgatcccgtcctgtccgaataactcgagtctgccggcgggaatctcgagctccagctgatgacctaccaga

SEQ ID NO: 1303 - DNA, 109 bp, Homo sapiens
gcgtcctcgtgtgggccttcagatgggaacttttaaagtatgtcttgccacatcctgggtggctacagatgtgactccttatccttgatgaatcaatctgaggagtgac

SEQ ID NO: 1304 - DNA, 41 bp, Homo sapiens
cccgctatcaggttctcataccggacgtggcggaataccgt

SEQ ID NO: 1305 - DNA, 87 bp, Homo sapiens
tcatcgtctggggagattatggccgcatggatcacaaatcttttatgggagtggcccagatacttttagatgaactagagctatcca

SEQ ID NO: 1306 - DNA, 76 bp, Homo sapiens
gcggcagcatggactacctgacgacgttcaccgagaagagtgggcgccttctgcggggcacggccaaccgcctgtt

SEQ ID NO: 1307 - DNA, 34 bp, Homo sapiens
ctgaattaggtgacttagatacctggcaggaaaa

SEQ ID NO: 1308 - DNA, 42 bp, Homo sapiens
gccacaaagttggggacacgccggaagctttggtcccgcgag

SEQ ID NO: 1309 - DNA, 120 bp, Homo sapiens
ctgtcacagcgagaatccttgtgcttttgccagtctttgccatgcttgcaggtggtgaggagcacaacgtcctccccgttatggacgtgatataaggcattcctggtgtctgatcctatc

SEQ ID NO: 1310 - DNA, 103 bp, Homo sapiens
ccttttgacttattatcacttccacatttttctggggagcagattgtacagagagagaaacagttagctaatgttcaagttttagctttggaagaatgcctaa

SEQ ID NO: 1311 - DNA, 78 bp, Homo sapiens
tgctgaggtcgctcacgaaactgccgctcttctcatccaggaagcgcttccagccgtcggccgtcttcacccagttct

SEQ ID NO: 1312 - DNA, 145 bp, Homo sapiens
agcaggtgcggatggcccatcagcaggtctgggcggcgctcgaagtggcgctccgggtgccctgcctttacatcatcgacgccatcttcaactcctacccggattccagccaaagccggttctgcatcgtgctccagatcttcct

SEQ ID NO: 1313 - DNA, 99 bp, Homo sapiens
aaaaaatgcagttgtatgagcaactgagtttcttttcatcttcaaattcatttgtgatggtgggaagatctaaggacaatccttccattgaagaagtag

SEQ ID NO: 1314 - DNA, 29 bp, Homo sapiens
atggggtacttgttaaggctcccagaaga

SEQ ID NO: 1315 - DNA, 123 bp, Homo sapiens
tctctaggaaatggcgggccacatggctgggtaagatattccggagcatgttctcattgtgttccctcagctccttcatctcattgatctcctctttggcctgtactcgccaaaggaagtcca

SEQ ID NO: 1316 - DNA, 128 bp, Homo sapiens
ctgggcttgttccgggaagcgaaaagaccaagatcaaataatagctggggtggagaaaaaaatagctcaagacacagttaatcgagaagaaaagaaatatgtacagaaccataaagaaccacctcgtt

SEQ ID NO: 1317 - DNA, 29 bp, Homo sapiens
tgaggccagtcaggacggactgggatgcg

SEQ ID NO: 1318 - DNA, 31 bp, Homo sapiens
tttcccgggaagccgatctctccaggcaaac

SEQ ID NO: 1319 - DNA, 26 bp, Homo sapiens
ccttgcaaaccaggaggtccatccct

SEQ ID NO: 1320 - DNA, 41 bp, Homo sapiens
aaggggaaaatctacgtgattgacgccgagaggaagaccgt

SEQ ID NO: 1321 - DNA, 98 bp, Homo sapiens
ccagccgctctcgggcgcggcgtgggggaggcggccctgcaggtgcgtacccggggtccgacacgtgcggggcttcctgcgagctgagtccccgctgc

SEQ ID NO: 1322 - DNA, 26 bp, Homo sapiens
gtcagcctgtcgaagaggtcgtcccg

SEQ ID NO: 1323 - DNA, 54 bp, Homo sapiens
agcctgcttgggccgctcctgctggcctccacaggccgtgagctgtcagtgtct

SEQ ID NO: 1324 - DNA, 269 bp, Homo sapiens
agcggaatgagtcctgcttggccaggccaggctcctccgggccctcgcgctctgggccgttgccgccgctgcccgggcctggcaccgggaccttggtggggaaggctgctgggacgcggaaggccgaggggagcaggtcgccggcaggtgcccggcccccgggagccagcacgtcgtcttcgtaagcctccgcttccatgggcgccggtaggccgtcgtcgcccccatcctcgccgtggcagccgctcaagtaggaggccaaacgccag

SEQ ID NO: 1325 - DNA, 62 bp, Homo sapiens
agcttgtcacccacacggactccagcccgggccgcagggccttcctcggacacccgagagat

SEQ ID NO: 1326 - DNA, 29 bp, Homo sapiens
aggcctgggtcccacggtacttgaggaag

SEQ ID NO: 1327 - DNA, 58 bp, Homo sapiens
cgaacgacgcggatgctgctgcgggcagcgtccagggtgtcgtagaaggcccgcacca

SEQ ID NO: 1328 - DNA, 29 bp, Homo sapiens
gggctcgtggtggagctggccgcaggctc

SEQ ID NO: 1329 - DNA, 106 bp, Homo sapiens
ccagagcctctcagcatggcgtttgcaggagcacccctccagacctccacccctatcggagccatgggcacacctgctcccaagacggccttctccttcaacactt

SEQ ID NO: 1330 - DNA, 27 bp, Homo sapiens
ccagaaccgggagacttaaggcatctt

SEQ ID NO: 1331 - DNA, 76 bp, Homo sapiens
ggcgagcgggctgtggctgggtgctggtgggcagacaccatcagagcacagtccgtgccctggtagcgcaggtgca

SEQ ID NO: 1332 - DNA, 110 bp, Homo sapiens
tctccaccgcggtagtgggggcgcccctgctcctcggagcccgctatgtcatggcagaggcacgggagaagaggaggatgcggctcgtggtggatggcatggggcgcttt

SEQ ID NO: 1333 - DNA, 103 bp, Homo sapiens
tctcaacccctggcgcccttccgtctccccaggcccctgtcctgcttccccaactacaggggtgcacgcagaggggtccccaacagtggtcccccatccccag

SEQ ID NO: 1334 - DNA, 332 bp, Homo sapiens
gctcgcgtgtccacgggtgcgggaggccccacggctcacgggccccaacccctcctcagccacagctgtcacttgggcctcctcactgtactctgttcccaaacccagcaggcctcctgggtgaacgaggtcctggctgcccagacagctgtgtgggaactgaagggtgggcccacacccacactctctcccgaggccaggaccccgccagaacgcaccctgtgctcatccccccgacaggagtccaggtggcctgggggcgtccccgcatgctgcccacccctcattcctagttaaaggggttcccttctgcccagcaagtcagagtgctg

SEQ ID NO: 1335 - DNA, 91 bp, Homo sapiens
cagcttcagtctgcgggagggagcggcctgaatcaccaaggcgatcatggccaagtaggtgtaggggggcttgtcatgtcgcaggtacctc

SEQ ID NO: 1336 - DNA, 109 bp, Homo sapiens
acagttaatgaggtctacaagctggtcatccccatcctagaagcgcatcgagaattccggaagctgacactcactcacagcaagctgcagagagccttcgacagcatcg

SEQ ID NO: 1337 - DNA, 24 bp, Homo sapiens
gcccctagatctgacagtgaagag

SEQ ID NO: 1338 - DNA, 24 bp, Homo sapiens
acatccacctcttctatatatcag

SEQ ID NO: 1339 - DNA, 71 bp, Homo sapiens
tggtggaggttgccaacttaccaaaatactagtggaacttgggctggtgcaactaatgtcttgaggaggag

SEQ ID NO: 1340 - DNA, 51 bp, Homo sapiens
aaatgcaagcttgagtgagtgccagggactccatcagaggcggccatcttg

SEQ ID NO: 1341 - DNA, 38 bp, Homo sapiens
tgggtagtttgtttgtgggtggctttacagctccatca

SEQ ID NO: 1342 - DNA, 32 bp, Homo sapiens
acccaggtgcgaatagtcaggtgccaggtgct

SEQ ID NO: 1343 - DNA, 158 bp, Homo sapiens
gagtcagcctgtggaccctgtgcacagctacctgtggcaactacggcttccagtcccggcgtgtggagtgtgtgcatgcccgcaccaacaaggcagtgcctgagcacctgtgctcctgggggccccggcctgccaactggcagcgctgcaacatcacc

SEQ ID NO: 1344 - DNA, 24 bp, Homo sapiens
ggagcgaggcgcggcctgcgagtc

SEQ ID NO: 1345 - DNA, 24 bp, Homo sapiens
tgggaccacgagaccatcgtctaa

SEQ ID NO: 1346 - DNA, 127 bp, Homo sapiens
ctcacttcgggcctccacagtctgcaccaggccttcacccagcacagcaaagtcctccaggattgcttcaacattgggcaccattactagctccccacctcgagacatcaccatgcgcccctttgtg

SEQ ID NO: 1347 - DNA, 71 bp, Homo sapiens
tgagttgagcctggtgcgcgcccgcgggagggtccggggcagcgggatgctcggcgccgactaaggcttgg

SEQ ID NO: 1348 - DNA, 30 bp, Homo sapiens
gaagccgcctcacgcacgatccggagccaa

SEQ ID NO: 1349 - DNA, 42 bp, Homo sapiens
agacgacctgggtcagcaccgctgcgacagccaggagcagcg

SEQ ID NO: 1350 - DNA, 29 bp, Homo sapiens
ctcaggtgtggcccggaagagcagctcga

SEQ ID NO: 1351 - DNA, 24 bp, Homo sapiens
tggattatgaggggcctcggtcac

SEQ ID NO: 1352 - DNA, 185 bp, Homo sapiens
accctgatagtgccgtcgatgaccgagatagtgactatcgcagtgagaccagcaacagcttcccacctccttaccatacagcttcccagcccaacgcttctgtgcaccagttccctgtgccggtgcgatcgccacagcagctgctacttcaaggcagttcccgggactcttgtaatgactctatg

SEQ ID NO: 1353 - DNA, 46 bp, Homo sapiens
aggcctcaggttaggaaggaggggcacaggttcttgttggcatgag

SEQ ID NO: 1354 - DNA, 94 bp, Homo sapiens
tgaggagagcaatgattctgtgaatttttggggaatttgtggcaggagggaggaatggggacataggttgggagccactgagtggacatttctt

SEQ ID NO: 1355 - DNA, 26 bp, Homo sapiens
cagaggtagccgagactggagcctag

SEQ ID NO: 1356 - DNA, 28 bp, Homo sapiens
tcaggatgtccggtttccccaggatgag

SEQ ID NO: 1357 - DNA, 44 bp, Homo sapiens
aaagctgtccaggaccagtgggactgaggaggtagtgaagcaga

SEQ ID NO: 1358 - DNA, 53 bp, Homo sapiens
gagaccggtgcgactcatgaaggtgttcgtcacccgcaggatacccgccgagg

SEQ ID NO: 1359 - DNA, 69 bp, Homo sapiens
aacatggggcaattccacgcagggtccatggagggagcagaaagcagccgcaatgaagagccacggtgg

SEQ ID NO: 1360 - DNA, 71 bp, Homo sapiens
ctccggcttgggagtcagatcttcgtaaaggaaatgacccgaacgggtctggcaactaaagatggcaacct

SEQ ID NO: 1361 - DNA, 38 bp, Homo sapiens
tgcaagctgaaatcacctttaagaagcccatgcctacc

SEQ ID NO: 1362 - DNA, 25 bp, Homo sapiens
cgtagtagcggaaggcattaatgat

SEQ ID NO: 1363 - DNA, 86 bp, Homo sapiens
tgaggacgttgctgcgaaggagacttttttcttatcccaccaaatactactttatggttcttgttttatccctaatcaccttctcc

SEQ ID NO: 1364 - DNA, 90 bp, Homo sapiens
catttcttcatccagcctagccctggcatcctccttcttggggttgcaccattcaagtacacaatcatatagtcttcagctaccatcaac

SEQ ID NO: 1365 - DNA, 375 bp, Homo sapiens
gatatttcgcaggccatgaatcccattgattcttgtgctcgtcatcacggaccaccaatcccatctgctttaccaccggaagattgcactgtgactcagtctaaatcaagtctcaccatcttgaagacttttccggaaatgttatctctaggtggctctggtgggtcatccacctctgccccaacaatcaaaggcattgaccattcacaccttgcatcttcagaattcacctggtggcagcctcatgccaaggactctttttcctctaattttgtgccatctgatttcatggaggagcttcttacccttcattcttctgaggcctttttaggggggcactctgtggccaacctcatagagcctgttaacatctca

SEQ ID NO: 1366 - DNA, 933 bp, Homo sapiens
agttaaccacgtgtgcagtccgcggcttctcagaaagaagagtacacactgttatgatctttctctccaggcatgccagcctgcatttcatagtttgattgaaattgtgccatccagtctgtctcttcacaaacaaatggaatattctgagctgccagcatttggaggcgcacagcttgcatctttttatgaagaaaaataaacactgtgtatcgtaacaaccaagtcatgatggataaaacatgcctgcgatcgagaaccacttgcacggcccacgccacagactcgaggcaggtggggaacggctggacagtgatggagaacaggctgcgggcggctggccgagagagatgagtgggagccgcgtgtggacgtgccatcaaggagaactctcttttctggttgcatccccgccattcctgaagaacacaggcacgtgttgtttactccattggtgacaattagtggtggcgtccggttccctttgtgcttccagtcattactcaaatgcttcaaacttgtcccatctcctggacatccttaggttgttttgtggactagaaagaatttcaaaccactcacatgtgatttgccaactcattcctttggacaactgcttttcatagccccaaagtcctggagcagtggtgctcagggtgtggtccctgggagcatcagcatcagcatcagcatccgtcagggaacttgggaaaaatgaaaatgcttaggcccagccccagagctgctaaagggggatgggcaaaggacaaagggcaaagagctcacgtcaagtgaatttacacccatttacacactttctagaagtttcatccagtgaggtctacttaggtctctttggccggaacggtgtcatatggccgctactcactgcaaggaagactagggaacagagcttttgagttgggcccgtta

SEQ ID NO: 1367 - DNA, 36 bp, Homo sapiens
cagccctggcaacgagagcgtctaccccgaactctg

SEQ ID NO: 1368 - DNA, 60 bp, Homo sapiens
ggtgcccaagatgcgaagcacatagcaaagctgttcaatatcgttcttgcccgggaaaag

SEQ ID NO: 1369 - DNA, 91 bp, Homo sapiens
tgtatcttataaaatacgatggatttgactgtgtttatggactagaacttaataaagatgaaagagtttctgcgcttgaagtcctccctga

SEQ ID NO: 1370 - DNA, 109 bp, Homo sapiens
tcagtctagtatcaagaaagccccctggaggaggcatcttgcttgggatgctgttgtagtatgggtggtctgagccatctccctcctcttccgtccatggctcatccag

SEQ ID NO: 1371 - DNA, 28 bp, Homo sapiens
ccctccgtgggctcgctgcatccgcccg

SEQ ID NO: 1372 - DNA, 31 bp, Homo sapiens
gccctgggcccagatcgccgggcccgctcgc

SEQ ID NO: 1373 - DNA, 280 bp, Homo sapiens
attagttactcaggatagagggcaaagagattatatacaaaaagtattttcaaggactatcttgttcttcctttataagaagttgaatttaatttttgaagtaattacttaggaagaaatgcagaggagttccacagaaaaagatggcaaccagaatgatattccgtcagccagatttttaaaattccttcactctgaaatttcttctttgtcagctaaaactgttttctgggtcagtttccttaggtgagccttgttcacattcagtatcaaaaccagc

SEQ ID NO: 1374 - DNA, 195 bp, Homo sapiens
tgatttagaaggagtaatggaatcacaagttcttttttgtgcagcctgttgctgtgttaagggtggtctctctattaccctcctgggccttgtactcatggccagagacccagtggaactctcatccttctgcacttttattatcttcttgggagggccatgaaagtcagagaactctcctcgccgtttcttact

SEQ ID NO: 1375 - DNA, 32 bp, Homo sapiens
gtaggacagagagcacccgcttggcaggcgca

SEQ ID NO: 1376 - DNA, 206 bp, Homo sapiens
tccatctccgcctcaggggcttctccaccccaagtctggctccattcctggccttctgttggtgacagaccccccccctaaggtgctcgtttgggggctcttcaggcagcacctcagcctggcacccccactcccctgcgcagcccccaggcctcaggaccccacccctctgaggcccaggggagccctgttcacgctggtttctc

SEQ ID NO: 1377 - DNA, 49 bp, Homo sapiens
tgtccggcgtggaaaggtacttctgcttctcgaagcgtttctccaggcc

SEQ ID NO: 1378 - DNA, 30 bp, Homo sapiens
ctcccggcaggaaaccttgcttacttctga

SEQ ID NO: 1379 - DNA, 51 bp, Homo sapiens
gaaggcaccgctgtagaaggcccaggccgggatcaggctcagaaagcccgc

SEQ ID NO: 1380 - DNA, 140 bp, Homo sapiens
caaagactattctgctgctcaggaattaatggaagatgagatgaaggaatattacagtaagaatcctaagatcacaccagtccaggctgtgaatgttgggcagttgctggccgtaaatgccgaggaggacgcctggttac

SEQ ID NO: 1381 - DNA, 28 bp, Homo sapiens
cattcccaagtgccggagtggtgtctag

SEQ ID NO: 1382 - DNA, 24 bp, Homo sapiens
tgactgccgagagcgggccgccgc

SEQ ID NO: 1383 - DNA, 83 bp, Homo sapiens
acccgtgcttcatcattgccgagatcggccagaaccaccagggcgacctggacgtagccaagcgcatgatccgcatggccaag

SEQ ID NO: 1384 - DNA, 124 bp, Homo sapiens
ggtgctggcgtcagaggccaagggctgctcctccctctgaggctccccactctgtggagaatcttcccctggaggttcatggcctgttccctgggcctgcttgttgccacggatgttgtgcatt

SEQ ID NO: 1385 - DNA, 26 bp, Homo sapiens
aacctggaatgcatggagccccagga

SEQ ID NO: 1386 - DNA, 30 bp, Homo sapiens
tggaggcggcggtcgctgctccgcgtcccc

SEQ ID NO: 1387 - DNA, 562 bp, Homo sapiens
gtgctgtccctcccttgtaattatgaaaagttctttggtttctggggtgaattctacccatgtataatgaggaattctctcataaccttttttgtcttgtctgtcatctctgttcatcccttcctataacctctaggtaaaaagaaaagaaaaaaagaaatttcgagatattttcaacattgttagagtttgggctaaaatgagcaaggagaaaaaaaccaccaagaacatttcctggggcatgttccagttttgaggggtgatatatctgccagatagggggtatctgacccagtcttcttttcagctggtctctggggggagctgagaactcgcttgctacctcacatccttttccccagactttttatctcctatgcatccctttgctttctatagctggtgtttcttccccaaaatggcgttcccatgcttacctttctcacattctagacaatgatggacaaagacgcatgcaagactcagacccggggaatggtgtggtgctaatctcaacacctgacattcacagcaagcatggcccagcccaactgcatgtcta

SEQ ID NO: 1388 - DNA, 36 bp, Homo sapiens
ggaggtggacaacgttggagcggattctcccctgtc

SEQ ID NO: 1389 - DNA, 190 bp, Homo sapiens
ggccaaccctccagaagctgggtttcccatggttcaattactagaagctcttttctcagaaggccaaacattcggaatatttagatgacactgtcccatctccccttgggaaaatcataaggtttcaagtggaggagcttgaagtagcagcaatacatgtaggagattcagtagtcggtgattccagtcc

SEQ ID NO: 1390 - DNA, 61 bp, Homo sapiens
ttcacgtaacttgcattaatataatcttcatttccctgcaataatacccgggtggtgtcat

SEQ ID NO: 1391 - DNA, 1139 bp, Homo sapiens
ctctctgggcgatgaaggacaatggtggtagggccacttagagagcagtagggcccaggctggtgcagcctacatggcacaggatatttccctgcaccagtttcccacctgtcacttgcagcatcagagggtgttgcattaactccattttctccagcagccataaaatgaatggcgtttctctccatatttgcccagaagaggcagttatgattccacttctcctacatttaattatttttaattgagaacaactcatgatcacaattcataaaatccatattttaagacaatagttcttcatgtcacaaacacaatctattctacatgaggaggctgagaaaggggaagagaaaaacaaaccaaatggatgatgttagctttaggatcgtgtctgcttataatattcactgatctgcagtttatgagaacacattttcacagttatgtttcttcataggaaaactatatttagtgggcaacaactatttttatgatgggatgggggagtatatacacgtatagaatctgtacgcgttgaacaacttggttcaagatggtgggggcatttttagagcggcaataattgaaaaaaaaggcgaactctgccttggagaggtagatgataagaaataaaaaggtgtttataactattttgtattataaagtgggccttagagataggaagaagaatgatggattccttttggatcaatcagaaaggaaacacgaaagaaaagtcaggaaggtagagagagaaaaagggagggaaggagaaagaatgggaataaaataaggaggtaagagatactatttttgctgagcaaccagtgtgtttcaggatgatacaaagaaaaatatagaatagaaataagtgcaggcttggaatcagctacaaatcctaaagatggggtgtgtgtggatgtgtgtgtgtgtgtgtgtacaccattgtgtgtttgtaaaatgtgtatgttcatgagtaagggtgtgtgtgtgtgtgtattaaaattccagagtgaccgtggcacttgggtgtacaggtaattcctccagagctgtttgctggcttcaggagtggagtgagaatttcttttttatgaaaagggatataaaggcaccgagctgatgcagtatttgta

SEQ ID NO: 1392 - DNA, 170 bp, Homo sapiens
tgttactcagaagtagctggacccaggaaagctctgagtcaactctgggagctctgcaatcagtggctgagaccagacattcacacgaaagaacagattttagagcttctggtgtttgagcagttcctgaccattttgcctggggagatcaggatttgggtaaagtcaca

SEQ ID NO: 1393 - DNA, 27 bp, Homo sapiens
tgggggcgccgctgctctctcccggct

SEQ ID NO: 1394 - DNA, 25 bp, Homo sapiens
tccatatcagctgtcttgatgcttc

SEQ ID NO: 1395 - DNA, 24 bp, Homo sapiens
ggccagtggcgagcagagccaggg

SEQ ID NO: 1396 - DNA, 110 bp, Homo sapiens
ctgaggtgggccagacattccacgcagaaggagtggcagcaatccagcattttgggggtatggaacgtgttgttgaaggggttccagcagacggggcactcagcctcaag

SEQ ID NO: 1397 - DNA, 31 bp, Homo sapiens
ctgcaaggtgtgctcggagcgccgctaccgc

SEQ ID NO: 1398 - DNA, 509 bp, Homo sapiens
cagaatcctttgctggccggaagagttcaccatattggtgaacctcagtatcatggcctttcaccatcttcctgttcccacgtggcaaccaagggagggaatgtggtctccctccctccctgatggccagcgccccctgccctccaaccacggccagccccacaaggtgaagggccccagggcagacacttggaggtaaacggaggtggcagtccgtagttgcctcagaccagggagcccagaggagaggctgagagagggcctgctacagctgccaagggtggttggggacccctgaaaaattagaaggggccccgcaaggtcagaccagctaaaagtccttacgtggtaagcatatgtacattgcaggcctgctgcttcctggaccaactcttccatggccctgggtgtcacccagtgtttctggagcctctgagtggtgcccgctgcctggcagcagcccctggaggtaggcacttcctggcatcatggcagatctggcatcctct

SEQ ID NO: 1399 - DNA, 24 bp, Homo sapiens
gggctctccgggaatccaggacct

SEQ ID NO: 1400 - DNA, 40 bp, Homo sapiens
aaaatcagggaagcaaggcgagaagggccgcactggagcc

SEQ ID NO: 1401 - DNA, 93 bp, Homo sapiens
catcctgggtcctaatgggccggcagtggggacaggagactgtgccattgccttttgggaccgccttaggggacagaacatggtattcgtggc

SEQ ID NO: 1402 - DNA, 101 bp, Homo sapiens
ccgtttgcgcctgccttcaagatttctgaagttgcttggtctcagcttcatctcagcaaactggattgagtgttcgtggcccttccagtggaaccagttaa

SEQ ID NO: 1403 - DNA, 149 bp, Homo sapiens
accccgcggatggtgatggtataatgagtggctgctttgagcccaggcaggtctgtggacctcagtcctcctgggacggtgaggttctgggctgcctctactgtgtcagcctcctgcacctgaatgaaaaagtactcataggccccttc

SEQ ID NO: 1404 - DNA, 59 bp, Homo sapiens
ctggacctgagctttaatcccctgaggcatttaggcagctatagcttcttcagtttccc

SEQ ID NO: 1405 - DNA, 24 bp, Homo sapiens
acccagcattggggttgatgccat

SEQ ID NO: 1406 - DNA, 24 bp, Homo sapiens
ggaacacgctgtcctcgcgcttcc

SEQ ID NO: 1407 - DNA, 26 bp, Homo sapiens
gttttcgaggcggtttctccactgtg

SEQ ID NO: 1408 - DNA, 119 bp, Homo sapiens
tggaaatcctccatctccccggcatggtcatgtgatggtggcagcagggacaaagctcttcatccacggaggcttggcgggggacagattctatgatgacctccactgcattgatataa

SEQ ID NO: 1409 - DNA, 54 bp, Homo sapiens
gctgatggagccatccaaagggctggaagattcagagtggaaaatggctcttca

SEQ ID NO: 1410 - DNA, 34 bp, Homo sapiens
tgaccttccatcagtgcccgtgtttgacagaact

SEQ ID NO: 1411 - DNA, 103 bp, Homo sapiens
accgcggtgcgctgaagctagagattccgaaagggggttcgggtagttcgctccggagaagtctgagaagggtggctccggtgatcccagccctagctgtttc

SEQ ID NO: 1412 - DNA, 110 bp, Homo sapiens
ggaccctcaggatgtgcgcctccttgtggccggccacgccttccaagtggcagccccggaccaaggctggagtacgcggccgccactcgagcgtgcggcccatgtcctgg

SEQ ID NO: 1413 - DNA, 63 bp, Homo sapiens
ctgagcgctctgcgtggaggtcctgggcgcgcaggtgccaccgcgccgtgtggtacagcccca

SEQ ID NO: 1414 - DNA, 62 bp, Homo sapiens
tgactactggatcaggacttttgttccaggttgccagcccggcgagttcacgctgggcaaca

SEQ ID NO: 1415 - DNA, 143 bp, Homo sapiens
tttgaggcgggttgagcgccgaggtagtgggggctgggagggtcgagccgtcaccttgctgggtgttttgtcctgggtgttgggctgggagggtgggcggccgctggaggtgaacagggctgtcaaagcgttccgggcgttga

SEQ ID NO: 1416 - DNA, 200 bp, Homo sapiens
ggcttgccggcttcggggaaggtgcggcaggcggtgctgcggcctggcacagcaggtttggggtgcgggaggcgggcggggtaggagcgcggcgggcggggccgggcggcgggcggggctggcggggcggccgggccatgcagggcgcagagccggctaaaccctgctgagacccggctccgtgcgtccaggggcggcta

SEQ ID NO: 1417 - DNA, 307 bp, Homo sapiens
gctgcttacagctcattctgctgggggtagagatgaggggagggagtaagttaaaccttggactagcaagtagaagcctggggggatgcgtgtgcctcagtttcctcctccacaactgaatatagtggctgaaaactggggagatacttgatggcgcgaatgtccgttttctctcccttcccacctcctgcaggaagcaggacggggcaggcagcacctggtaggcacagtgctttgcccctcctccccttcccttctggaagtcttggggcctcagtgcttgcaacagccggccttgggcaaataa

SEQ ID NO: 1418 - DNA, 117 bp, Homo sapiens
aaacaaatgacctgcacggacatcaacaccctgacaaggcagaaggaacttctcctgcagaagctgagcacatttgaggagaccaaccgcaccctccgagacctcctgagggaacag

SEQ ID NO: 1419 - DNA, 24 bp, Homo sapiens
ctcccctgcaacaccaaatggaac

SEQ ID NO: 1420 - DNA, 166 bp, Homo sapiens
tgtgctctcactttccactgtaaccttaagcctgcttagcttggaataagacttaggagaaaatggtgcttcactaacccgcttccggtccagtcacaatcatcatgtcactgtggggacccagatctgtgtcttgaagcagctgccctcattccgacttcagaaa

SEQ ID NO: 1421 - DNA, 50 bp, Homo sapiens
tgagctatgccctgcggcccgagacctgggccacaacacggctggagctg

SEQ ID NO: 1422 - DNA, 683 bp, Homo sapiens
gcccgccgagcactcttgatctgagctgacctgtgtgtgtgtgtgtgggggggtggggccttcacctaagacctctgcagcagacctggacagacaggcccctcccgcctgtccatcgctctagctgctaatacagccctggctgtggaatccttcaccgtctcagctggtatcagccccagcctgccttgtgccatatctcagcttggatctctgctagagtccccccaaccatatatcatagagttgaatcacaatgagaccgttggctttgaatttgagtcgttggttcccatggtgagatgcttgttaagactttatacttgggtcaatctctcactttattttgtagaaccatttgaaatcctaggatgtgcttgttctggaaggatgacatgggcccagactgaacaagtcagcttgatgatcttaaatgatggaagtataggacgttgcttattttaaaacaagggaaggacacaaaatggaatgactgcttagtcctttctcagatactcttaaaacaattttttattgttaaatttgtggtaatacatggtcacaaccgtggatcaaacaaggtcagtctaaagtggcaggtcctaggtgtgacctgataccaccaccctttgtggcagcaccgggctggactgccctgatccctgggacgtgagacttagctt

SEQ ID NO: 1423 - DNA, 24 bp, Homo sapiens
tttgccctcaccttgactccatag

SEQ ID NO: 1424 - DNA, 64 bp, Homo sapiens
tgggggcctgtcgtcaccctggaagactgccttgctgccttctttgccgctgatgagttaaagg

SEQ ID NO: 1425 - DNA, 73 bp, Homo sapiens
ggtccctccatggcactctgggtcctctcctcactctccagagaccctcacatgtccttttgaacatccaaag

SEQ ID NO: 1426 - DNA, 26 bp, Homo sapiens
agcccgaagttgtggaggagctgacc

SEQ ID NO: 1427 - DNA, 32 bp, Homo sapiens
acaatggagcccaaatggggtcctcctgagcc

SEQ ID NO: 1428 - DNA, 49 bp, Homo sapiens
agaagaccaagcaggcggagaggatgctgggaaacgcggcccctctttc

SEQ ID NO: 1429 - DNA, 24 bp, Homo sapiens
gtcgggcgagctcagcaacaggtt

SEQ ID NO: 1430 - DNA, 31 bp, Homo sapiens
tttcgatccctgggaccaaccgcatcctcag

SEQ ID NO: 1431 - DNA, 682 bp, Homo sapiens
gctggtttcgggtctaaatgcccatcctcacccttctcccaagacaaccgggaagaagggctcaagagactctcgcgggcgaccccaaccctccctccacctctggcagaagaggaaaagtccggtagaaaagagatcctgctttctttctccgattggttttcttcctttcaattcagcttaaggcaaaagtttggcaaagcaagtctacataaggccgcatgacagagggcggagggacctggggggaaggccggccagcgccacaaatcggcagcagtgtggatctgtctctttgatcgggggctggagcttccctcctaatcagctccccctcctcctgcccctgagcccccaaaagaggagtttttttaaaaaacggaaaaagcagtgtttcagggaatctgttacaagtgagcgactgaaactgagaaaaaggagaggcaaggagaccagaggtcaccctgagggcgcacgtggggtctgtctgtcctgcttagatctcccctctccctgaaaggaagcaggtgccgagagccggggaggccttcccgggggcatcagcacagtgagatccgcccgctggagagggtagaatggttgtatcttgctgaatgactgaagagtgagtctgagttttgttttcagcggtattattatttgtgagtctaacctagcgggt

SEQ ID NO: 1432 - DNA, 39 bp, Homo sapiens
ctggctaacactgacaggggtcgcttgttcctgtgcagt

SEQ ID NO: 1433 - DNA, 58 bp, Homo sapiens
ggcaggcagaactcctcgaaggccggcttcacgaaggtggtgtactgcgtcagaatct

SEQ ID NO: 1434 - DNA, 105 bp, Homo sapiens
aaatggaagcgacagacggccgtcgggttggagctgctggcggaggcaggcaattactcagcgctccagcggatgttcccgtcgccttatttctacccgcagagt

SEQ ID NO: 1435 - DNA, 24 bp, Homo sapiens
tccaaagtgggtccagtcgacaga

SEQ ID NO: 1436 - DNA, 85 bp, Homo sapiens
ccaaagtctcgcacatcgaagaggtcaaaggggtcaaacagctcgctgttccttaatccaaatttatcgtggcagactttcagga

SEQ ID NO: 1437 - DNA, 27 bp, Homo sapiens
aggcaaggatggactcccaggacaccc

SEQ ID NO: 1438 - DNA, 25 bp, Homo sapiens
tgccaggtcgttggaggtggcagcg

SEQ ID NO: 1439 - DNA, 47 bp, Homo sapiens
agaagacactgaacgagcttcccttgttttgcctggaagcccacgct

SEQ ID NO: 1440 - DNA, 154 bp, Homo sapiens
tgcttatcagcactctgcagcgcgacggggctgctcggggcaccagcgatgagcgcgccgcacagaggggccacagggcagagggatgccacgacgccaggccggctgccaagcccaccgtgcacaaggagccacccgcgttggctgtctgtgg

SEQ ID NO: 1441 - DNA, 82 bp, Homo sapiens
atgatgtagaagatcactcggtagcctgtcatgaagtgcttatttgcggagtgtaggaacggcctcaggtactcctctgcaa

SEQ ID NO: 1442 - DNA, 145 bp, Homo sapiens
agtcgctgcacgactcttcccggtgcaccgacttcggccgcggcttcttcggctttgacttgggcttgccgagcccctgctcctctaggatctgctgctgcttcctccgcaggtactcctgcttgatgagctcgcgccgcgcctt

SEQ ID NO: 1443 - DNA, 94 bp, Homo sapiens
aagcatttagtgctcatcgccgtccctctgaggggggccgtcagaaaggcaactgggacctgacagacccgggcacatacttgaaattcctgaa

SEQ ID NO: 1444 - DNA, 214 bp, Homo sapiens
aggcacactcgtgggtgacgtcgcccgtggggcggcaggtgcccccgttctggcagggcgaggggctgcagggcacgtagggccgctcgcagttggggccagtgtgggtggcgcggcagacgcagcggtaggagccgacctcgttgtggcaggtgcctccgtggcggcaaagcccgggcttctggccacactcgttgacatcctgccggcaggt

SEQ ID NO: 1445 - DNA, 97 bp, Homo sapiens
tctgtgaatccacccctggctacccccaccctggctaccccaacggcatcccaaggccaggtgggccctcagctgagggaaggtacgagctccctgc

SEQ ID NO: 1446 - DNA, 25 bp, Homo sapiens
ctggggagaaggcttgactatttga

SEQ ID NO: 1447 - DNA, 26 bp, Homo sapiens
accctgggggtggcgactacgaggag

SEQ ID NO: 1448 - DNA, 110 bp, Homo sapiens
gtatctacctgaacggcgacggcaccgggcgaggaacacacctgtccctcttctttgtggtgatgaagggcccgaatgacgccctgctgcggtggcccttcaaccagaag

SEQ ID NO: 1449 - DNA, 135 bp, Homo sapiens
cttggagcaggacgcgaactggtacccggaatgggagaagctgaggtgcaggacctggtctgtgtgttcccgcagcgtctgcacctccacgcagggcaccgtgtcatacagccgctggaactcctcgtaccagga

SEQ ID NO: 1450 - DNA, 34 bp, Homo sapiens
ggcacctggtacatggtcggggtggtgtcagatg

SEQ ID NO: 1451 - DNA, 59 bp, Homo sapiens
cgagcgcccgagctgtttcccgaaggcgcccagaagatgcagctactggcgccccaagt

SEQ ID NO: 1452 - DNA, 93 bp, Homo sapiens
gtacccaatgagggcgatggccgtggagagcttccgcttgttgccgccgctgtaggtgccagccggcttgtctgcgtacttggtcagctccag

SEQ ID NO: 1453 - DNA, 127 bp, Homo sapiens
gcttgctccttgaggaccctgggcagggtggctgccatggggcccaatcgtgcgtgggaacctgcgagctggcaaacggggctcgggggttttgcccagaaatgggtcagaacgaaagcctctcaga

SEQ ID NO: 1454 - DNA, 30 bp, Homo sapiens
tccgcgctggagctcggttccagcgccgcg

SEQ ID NO: 1455 - DNA, 134 bp, Homo sapiens
acgtcatgaccagcgagttcactctggggcccacggccgagttcttcagggagcacaacttcttccacctggaccccgccaacgtggtcatgtttgagcagcgcctgctgcctgctgtgacctttgatggcaag

SEQ ID NO: 1456 - DNA, 31 bp, Homo sapiens
ccaggtggagcaagttggcaaacaggctcct

SEQ ID NO: 1457 - DNA, 56 bp, Homo sapiens
gagcacgctggtggcctccaccaggaggagaatgagtgccgtgaggcctgagaccc

SEQ ID NO: 1458 - DNA, 150 bp, Homo sapiens
gaactcggccaaggcgcgctcggtgtgggagcagcgggccagccagctacggctgcagaacctgcgggccagctgcgaggcgctgtacagcgagatggaccccgaggagcggctgcgcttcgccactacgcgccacctgcggcccgacat

SEQ ID NO: 1459 - DNA, 233 bp, Homo sapiens
gccgagaaggtcgcaggcagcggcagcgcgcaggatgcggaccgaggccggcggggacgtcgcgggggacccggggcccgcgggccggcggccgggcagcagctgcagaaggcccagcgccaagcggagcccgccgctgcccaggcagagcgcgtggaaggcccgcggctggaagctcagcacgagctgcgtggctgcgtcccgcgtggggcagcagaaggtccctaggcgcg

SEQ ID NO: 1460 - DNA, 25 bp, Homo sapiens
tcgccccccagaaactgacggacaa

SEQ ID NO: 1461 - DNA, 34 bp, Homo sapiens
tgggtccgctcacgaccgtcctgtttcttgctcc

SEQ ID NO: 1462 - DNA, 66 bp, Homo sapiens
cagcagcccgtgatcccccagcaaccaatgatgcccgttcctggccaacactccatgactccaatc

SEQ ID NO: 1463 - DNA, 30 bp, Homo sapiens
cgccgccggtgcgctccaagtgccccggcg

SEQ ID NO: 1464 - DNA, 33 bp, Homo sapiens
gcctcccgcgtcgctgtcgctgttgcctccgcc

SEQ ID NO: 1465 - DNA, 53 bp, Homo sapiens
tcttggccgaagcaatccgaaggacacacaatggggaatccgtgtcctacctg

SEQ ID NO: 1466 - DNA, 356 bp, Homo sapiens
tcccggaagcgacttgccaagacagtgctggtgtttgtgggcctgttcgccttctgctggctccccaatcatgtcatctacctgtaccgctcctaccactactctgaggtggacacctccatgctccactttgtcaccagcatctgtgcccgcctcctggccttcaccaactcctgcgtgaacccctttgccctctacctgctgagcaagagtttcaggaaacagttcaacactcagctgctctgttgccagcctggcctgatcatccggtctcacagcactggaaggagtacaacctgcatgacctccctcaagagtaccaacccctccgtggccacctttagcctcatcaatgg

SEQ ID NO: 1467 - DNA, 72 bp, Homo sapiens
tgaaaacagttcttcttattcccagtctcattgttcctcccaaattgccagggttgtgctcgggcatatcaa

SEQ ID NO: 1468 - DNA, 36 bp, Homo sapiens
tccccaggtaatcaccacgcctctctttattgatca

SEQ ID NO: 1469 - DNA, 114 bp, Homo sapiens
ctccggctggcgtgcaatttaatttcgactttgatcagatgtaccccgtggccctggtcatgctccaggaggatgagctgctaagcaagatgagatttgccctcgttcctaaac

SEQ ID NO: 1470 - DNA, 108 bp, Homo sapiens
tggaagaattctatgcctggctcccaatcggtacaatcgttgacaatgaaatcctggtcatccatggtgggatatcagagaccacagacttgaatttactccaccgtg

SEQ ID NO: 1471 - DNA, 65 bp, Homo sapiens
gtgaggacggcaatgctgatgtcctgcccactggcctcgtagatgagttttgtgagctcctctgg

SEQ ID NO: 1472 - DNA, 111 bp, Homo sapiens
ggcggtggctgcacaccatcacctggaagaaccgagttgccggtggactccgggggtgctggatgtccgacggcgcagatgcggcgtcccgggagtgcagggcgaggactc

SEQ ID NO: 1473 - DNA, 51 bp, Homo sapiens
tcaatcagtagaaggcgggacaccgaagccatacagaaagccaaaatcctt

SEQ ID NO: 1474 - DNA, 67 bp, Homo sapiens
tctgactgataagccacccaagcttttgtatcctatggaaagtaaactgacaattcaggagacccag

SEQ ID NO: 1475 - DNA, 27 bp, Homo sapiens
caggtgtaccgtggcatctcgcactgc

SEQ ID NO: 1476 - DNA, 201 bp, Homo sapiens
cagaagggtctcgccagcgttcttattgacaataagtctccgtgcttccggcggcatagggcgagactgggtggtctcctgaggggaacttgagcatggcagctgtgtggactgggaggctggtagcagttgctgcaagcggtcgaagggctttggctcctgcttggctggtgacagatcatagtccgaactgggctccgg

SEQ ID NO: 1477 - DNA, 94 bp, Homo sapiens
gggcttggcgcaacggcacacgatgcggtcctcgagcctcccgggcgctcggtcaccgcgccgaaacgggagcgggcagagtcgccaccgccta

SEQ ID NO: 1478 - DNA, 31 bp, Homo sapiens
atgaacatgagtcgcctccacctgaagatgc

SEQ ID NO: 1479 - DNA, 29 bp, Homo sapiens
aagaaagatggcacttggcccagcgcaca

SEQ ID NO: 1480 - DNA, 24 bp, Homo sapiens
gcctctgacttgggaatttggtac

SEQ ID NO: 1481 - DNA, 31 bp, Homo sapiens
accatgggggagagtccccattagctgccat

SEQ ID NO: 1482 - DNA, 97 bp, Homo sapiens
atggcttccgttgccaaacctgtggctacaagttccaccagcattgttcctccaaggtccccacagtctgtgttgacatgagtaccaaccgccaaca

SEQ ID NO: 1483 - DNA, 90 bp, Homo sapiens
gcacatctgtggaccctcataaccctcttaagacccctctcagggtgccactgatgggggatgagggaaggccctctctctactccttga

SEQ ID NO: 1484 - DNA, 25 bp, Homo sapiens
gccgcccagctccgggaatggacca

SEQ ID NO: 1485 - DNA, 149 bp, Homo sapiens
tgagttacttgctgccctgtgctcctccccgcaggacatggctccccctccacctgctctgtgcccaccctccactctcctcttccaggcccccaaccccccatttcttccccaccaacccctccaatgctgttatccctgcctggtcc

SEQ ID NO: 1486 - DNA, 43 bp, Homo sapiens
atcgtagcggcgacacgagagagacgggcggtgtgacagcctt

SEQ ID NO: 1487 - DNA, 79 bp, Homo sapiens
cggagggtggcgacttgggtcctgcagatgcccaacaccctccaccccagtccccctcccttgtgtccccccattgctg

SEQ ID NO: 1488 - DNA, 35 bp, Homo sapiens
tccttttcccaggccggcgcgctgcttgctgggaa

SEQ ID NO: 1489 - DNA, 52 bp, Homo sapiens
cggggacgtcgtgctccacatcaacggagagtcaacgcagggcctcacccat

SEQ ID NO: 1490 - DNA, 89 bp, Homo sapiens
cagtgatggtcaccgggaagatgcgcacgatgccacgccccagattctcccgcttccgctgctggctaaaggctcggagctctttcttt

SEQ ID NO: 1491 - DNA, 172 bp, Homo sapiens
cctcctcatcgaagcgggagaggatggactcctcgtcgctatagagagagctggttccctgtgccagcaggtcactggcagcattgtccatctcatccagcgtcaggcgacacgcatctgcaatctcctgcttggccagggccacgaaacgtgggtctcgagcaaagaggcc

SEQ ID NO: 1492 - DNA, 67 bp, Homo sapiens
atgtgtcccggctggcctacacccagcgcatcctggagatcgtgggcaacatccggaagcagaagga

SEQ ID NO: 1493 - DNA, 56 bp, Homo sapiens
gaagatccgggaggactaccgagccctccgccaggagaacgctggcctcctaggcc

SEQ ID NO: 1494 - DNA, 74 bp, Homo sapiens
agcggatgagcgtggcgtaggtgaaagggggtcgcatgttgtggaacttgaagtagtccatgttgtggaggaac

SEQ ID NO: 1495 - DNA, 43 bp, Homo sapiens
ctttatcttctacattcagggtggacacatcgacaaagcatat

SEQ ID NO: 1496 - DNA, 260 bp, Homo sapiens
gataaactggagggcatcaactgggggaggttgtagtgtaggagtttgggtgagggggcccgagcccatctgtttggacttgagggaaagtggcttggggttagagtcgggggaggatcagaatgtcttgcccaaggttaagaagctggtggaacttgatttcagaacccagagctccctggcttcagccctagtgctcctgccagcactacagctgctccactgactggtgatggaagcactgtcttccccgtctaaga

SEQ ID NO: 1497 - DNA, 118 bp, Homo sapiens
gtggtgctgtggactgggaccgcagggcaagacccggtggcctggagcagcgcccaggctggtgtccgagggtccgacaaactggggatccagtgggccgccaagagccgaacctgag

SEQ ID NO: 1498 - DNA, 81 bp, Homo sapiens
ttccgaggctccagggtccgagtcggcacaggccggcggagcggcgcccggcgggttcgtggccgggtgttcgggctccga

SEQ ID NO: 1499 - DNA, 45 bp, Homo sapiens
aggcgaccacgatgccgtgggccgagagtggcaacgaccctttcc

SEQ ID NO: 1500 - DNA, 199 bp, Homo sapiens
ggccagaaactcataatccagaggaactgtgtccagcaggcgggcgtagttgccattgatctgggcgatgatctggtactcctgtcctatgcagggctcatcagagtagttgttgcccagattctgggaagttggctcatcactggagcagccacttgcgaagatggccaccctcatggtttctccagagtcgttggcc

SEQ ID NO: 1501 - DNA, 289 bp, Homo sapiens
acttcacacgtgtagtggctccggtcatccatctccagggtgctcaattggagggatacatctcctggaaccttgtggctcacatgcaggcggccctggtactttgcctgctggatatggtctccagaagagtcacgtagaaagatggtgacagggtctgagccacgttgtaccagccacttcaccaagacttgggtgtagccttgcagggggtcataggtgcagggaagattcacatcccctttccaaggtcctgttacactctctggcacttccaggatgggacggc

SEQ ID NO: 1502 - DNA, 472 bp, Homo sapiens
ggtaactccctttggctgcgagcgggcgagctagctgcacattgcaaagaaggctcttaggagccaggcgactggggagcggcttcagcactgcagccacgacccgcctggttaggctgcacgcggagagaaccctctgttttcccccactctctctccacctcctcctgccttccccaccccgagtgcggagccagagatcaaaagatgaaaaggcagtcaggtcttcagtagccaaaaaacaaaacaaacaaaaacaaaaaagccgaaataaaagaaaaagataataactcagttcttatttgcacctacttcagtggacactgaatttggaaggtggaggattttgtttttttcttttaagatctgggcatcttttgaatctacccttcaagtattaagagacagactgtgagcctagcagggcagatcttgtccaccgtgtgtcttcttctgcacgagactttgaggc

SEQ ID NO: 1503 - DNA, 40 bp, Homo sapiens
cctggatggatagctactccggaccttacggggacatgcg

SEQ ID NO: 1504 - DNA, 60 bp, Homo sapiens
gcagacattgcacccctataacacctttgccgcagggttcaacagtaccgggctgcccca

SEQ ID NO: 1505 - DNA, 28 bp, Homo sapiens
cagcagctaccatcactgctgccgccat

SEQ ID NO: 1506 - DNA, 125 bp, Homo sapiens
agcccatattctatggagtccggatgatcatcatcgccctcttggctgaccttctggagatgctgcagataagcatcagtgtggaaggtggccatctcctccatggaggccactttaggcttaac

SEQ ID NO: 1507 - DNA, 146 bp, Homo sapiens
tgtacccgggcactctcatgagccctgggggcgacggcacagctgggacaggcggcacagggggcggtgggagtccgatgccagcctccaatttcgctgcggcaccggctttctcgcactatatggggtatcctcatatgcccagc

SEQ ID NO: 1508 - DNA, 95 bp, Homo sapiens
ttggagagcagtgaacatgacgataacggagtaatttctcggtggggctttcacaaggcgacggaacttgtctccattcattcttattacaggtc

SEQ ID NO: 1509 - DNA, 91 bp, Homo sapiens
gccaaccgctgtttcagcccctagctggattccagccattgctgcagctgctccacagcccttttcaggacccaaacaaccgcagccgctg

SEQ ID NO: 1510 - DNA, 124 bp, Homo sapiens
tcccatatttctgcttcccctcacttttagaagttaattgatggctgacttctgaaagtcactttcctttgccctggtacttcaggccatatacatcttttcttgtctccataatcctcccttt

SEQ ID NO: 1511 - DNA, 85 bp, Homo sapiens
cgtggccgctggtgtggttatcggggctggtgcctgctactgtgtatacagactggcttggggaagagacgagaacgagaaaatc

SEQ ID NO: 1512 - DNA, 102 bp, Homo sapiens
ttgggtaccgctccagtcgctgatgtggctttcggtatagccccagtgtgagccccaggggttgctttcttggcagctgatgttccaggaaccaccgctgtt

SEQ ID NO: 1513 - DNA, 45 bp, Homo sapiens
gtaggtaggtgggtaggaggatcatgaaggctctagttttttctt

SEQ ID NO: 1514 - DNA, 24 bp, Homo sapiens
aattcaggcgtgctgcaagtctct

SEQ ID NO: 1515 - DNA, 28 bp, Homo sapiens
tgggcaatgaatcctcggtaataatcat

SEQ ID NO: 1516 - DNA, 66 bp, Homo sapiens
tgctgatggagttcggagtctctcctgtctcttgggggctcttgagggtctattccctgggcctcc

SEQ ID NO: 1517 - DNA, 85 bp, Homo sapiens
ttctaagcccctttgtagcgttcaaggaagaccagaaactggccacactatttccctttcctgtctctctgcgcttggaacacct

SEQ ID NO: 1518 - DNA, 25 bp, Homo sapiens
tgcgggatggtgatgtcctggctgt

SEQ ID NO: 1519 - DNA, 80 bp, Homo sapiens
ggccagctgctccaattgtggtacggcctgggtttccttggtcccccttcagccctggaaatccctgaggccctagggct

SEQ ID NO: 1520 - DNA, 60 bp, Homo sapiens
tggaaggtgggaggcgcgcccagggatgagcgagatgaggagggcgcgaaccagcaatct

SEQ ID NO: 1521 - DNA, 120 bp, Homo sapiens
ggcaacattgagtggcggacaacactttttggcatctctccaattcagctgttagcatctcctagtgtcttcttcacagctaacagctttggctacttgctcatgacactccgtctctga

SEQ ID NO: 1522 - DNA, 24 bp, Homo sapiens
tcttatttgtccttcttagcagct

SEQ ID NO: 1523 - DNA, 41 bp, Homo sapiens
ttatcacttccaattccagagtcagggccatgatttttatt

SEQ ID NO: 1524 - DNA, 64 bp, Homo sapiens
ttatattccctccaattcctgatcctggcaagatttttaaagaaatgtttggagaccagaatga

SEQ ID NO: 1525 - DNA, 252 bp, Homo sapiens
catgagattttcacgtcgccgctcaacctgctgctgcttggcctctgcatcttcctgctctacaagatcgtgcgcggggaccagccggcggccagcggcgacagcgacgacgacgagccgccccctctgccccgcctcaagcggcgcgacttcacccccgccgagctgcggcgcttcgacggcgtccaggacccgcgcatactcatggccatcaacggcaaggtgttcgatgtgaccaaaggccgcaaattc

SEQ ID NO: 1526 - DNA, 48 bp, Homo sapiens
tggctacgtggaggcgggacggccgactgacaggcggccaaaggctgc

SEQ ID NO: 1527 - DNA, 24 bp, Homo sapiens
tgatccaccgcctttcctggagaa

SEQ ID NO: 1528 - DNA, 130 bp, Homo sapiens
gtagacctagcctatgaaatagccaaacatgtaaggatcaaatacaaattgtccatcgttggtgacgggaaatatggtgcaagggatccagagactaaaatatggaacggcatggttggggaacttgtct

SEQ ID NO: 1529 - DNA, 25 bp, Homo sapiens
ttagtggtctccacccttgccatcc

SEQ ID NO: 1530 - DNA, 70 bp, Homo sapiens
tctgcctcgggcttcggacgcacacggtccgcaccaagggcaccagcttctgcttcaaagcacccgccgc

SEQ ID NO: 1531 - DNA, 105 bp, Homo sapiens
tctggcatcggtggttttacttcttcgattgaaccctgcttcctcgacccccctgggaggccgccttcttcaggcgcctcccttctctccacgagctcgctctga

SEQ ID NO: 1532 - DNA, 26 bp, Homo sapiens
taccaccgtacgaaagaagcctgatc

SEQ ID NO: 1533 - DNA, 32 bp, Homo sapiens
tgcagggataaatgccggctgtgggagctgca

SEQ ID NO: 1534 - DNA, 71 bp, Homo sapiens
cagcgtcgcctgaggacgtgcatccgcctgcggcggccccgggacagcagcgcgaaaagcggggcgcacgc

SEQ ID NO: 1535 - DNA, 25 bp, Homo sapiens
ggcctgatgacatgcccccttgtcc

SEQ ID NO: 1536 - DNA, 25 bp, Homo sapiens
tcttgcctctccggggatttgcttc

SEQ ID NO: 1537 - DNA, 74 bp, Homo sapiens
gtcacctggagatgacgtcctgggcggctctgccccttctatccagcagcagcactaatgtccggagacccaag

SEQ ID NO: 1538 - DNA, 25 bp, Homo sapiens
ggcccatgctgcgggagcctgtgtg

SEQ ID NO: 1539 - DNA, 49 bp, Homo sapiens
tggaggcagctagcgcgaggctggggagcgctgagccgcgcgtcgtgcc

SEQ ID NO: 1540 - DNA, 41 bp, Homo sapiens
tcttcaggcatgcagcgctgacgctttggagctcgaggcat

SEQ ID NO: 1541 - DNA, 25 bp, Homo sapiens
tgtcttgacgggatcactggggctc

SEQ ID NO: 1542 - DNA, 137 bp, Homo sapiens
cgtacccctgtggcgacgagcacacccccagccccattgctggccgccagcccctggaggtccagcctctgctgaagctcgggcagccggtcagcgccgtggcagctctccaggcagatgggcacatgatagccttc

SEQ ID NO: 1543 - DNA, 58 bp, Homo sapiens
cagctcaccatccgaggtcagcacctccagacaggtggcaacaccagtgccttcgtgg

SEQ ID NO: 1544 - DNA, 113 bp, Homo sapiens
agggcctcaacctgggcatcagcaaggaggaggtgcgcgtgcacatcggccgcggcgagtgcctggtgaagacgctcacgcgcacccacctgtactgcgagccgcctgcgcac

SEQ ID NO: 1545 - DNA, 255 bp, Homo sapiens
gacagcagcaagccggatccaccaacaccgcagcgccttatgaccccggaaccgagccagccactgaggggagctggcagagcctgggggcacagggtgcaaagccaggcactgtgcccagcagtgggctccctgcctgccacctcccctgccagcccacccaccttccccccacctgagattgtttctaatttataaggatccccctccttccccctctccccattgtatttatttgcctgctggaaaatcaca

SEQ ID NO: 1546 - DNA, 28 bp, Homo sapiens
gccagcacgggcggtggtggggacagcg

SEQ ID NO: 1547 - DNA, 89 bp, Homo sapiens
caccaggaggcgagtcccgtcacacacgaagccataggctgcacacccagggggaatgtcccccctcacggctgggatgaaccactggt

SEQ ID NO: 1548 - DNA, 2329 bp, Homo sapiens
atgggtactggaaagctgtcggtcaattctgctgttcacaaattcactgaaagaggcccccatcttcataatgttcaagtacagacaaaattgaaattgaggtcacaccccaaaactgggccggacacagctggtgagaatcctgcagcttaaggctttccctccaacctcctgtcaacctgaccccaaggcaggggcagcatgagagctgcagggcccctgcctgccagggcgataaaccgccaaggctgcctgctgaaaggcgactgactcgtgatgcctttgggaaagacgagggaatgaggaagaaagggggaaatagagagaaaaccctaaggagcctcaggccccactggcagctctggaataaactggaagggaaagaggctgggcaactgcctctttgagggagctgcaggtggggcccgaatgaaataaagtgacgcttgaaatgctgtgttcccaaccacgactgccccatcggccctgaatgaactgtcatgggtgacaggggggcctggtgggccacgcactcctcttaccaggaccagatgacgcccaggtgacggggaagcagctctggacaatgattccagaagccacattacatttgactaagtataatacataaaaacccaactgaccaaaataaacatcttctcagtgacaacctggtcggatgctgcgctctcgtggataagtgtcctttggtagtgccaggagttcgaggccactatgggggcaggagccttctgtccttggaggaagagttctggaggactcaccctctcttctgaccccccttcccttcctggggaagagtcagaagtgaagctgggggggtcatcagcagagcaggtggaagggatcagggatcagggattgggctgatgggagtttggttgcaggacttgcttttacagcataaggaaatggacacatatatgctagaaagtccaactatgagactctacaaacagaacggggcaaactccctcacttctaaccattccagaagagacaaacacggttttttcttaagctactgattggaactgtcaactatggttcctgatcactaaagactggcaaggaagtgctagacagtttctatgatgtttcactccttcatgattacaccatagtaaggaagccagggacaataactgaaatacacaagacaacacacacttgacagttcatggcagcagctcacatgggacatgcctgtgggtgtttctggaagcataagactgctgtctcatttgctactttgataaggtacttctcagttggacagatttagatataagagacatctctgtaaacacagaaaaggatataccaatatgatgaagatatgcagctagataaggacttcctgaacagaggttaaaaagatgggatcccacatgaaaactgatcaattaaaaacccacagcaagcccatgcctctaagcccctacaccacagctatggaccagacagacagtgaaatgtgtggtgttctggccccctgtctgcatcgagcaaaagcaaaacattgccattcaagaagaactccgagggaaaagggggagcagaggaagggctggggacccaggtactggtcccagctcgggtcttgggagttctgcattggtaccgctactgccctgctgcactacgctagactctggacttctgagtgaggtcaaggtcggctggcatggagcccctgttgggccactcgatgactggcaggccacaggaggcctctgtgctttcctcaactaccaaatcgggcccagctcctccagtccacttctctagagtagaagggtgaaaaggctcgttgttcagggtgggaaatgccttttgctttttcttaccagggaagagggggctacctaggagagcaagaccttgctgctctcttgctcttcacagacaggccaggtcggactcagcagagcccaaggcctcctcagggctcaaaacagggtggggctggtactggcagcaggaggacaaagggcaggcagagttctggggactggagccgacaagtgtggttgggcaccgcggctgcctggaagagaagggatgaactaggaaggaggaggatggaggaagggaaagaagtgaaaggatgaaatgaacaaaaggcagaaatggaaggggagaagagaaaccaatcaggaagtccttataaaattgcagcaaacacttagagtttcggagcttcgtgggaaccctatgtgctgagcccactttaaaacaagcgcaggtatatatacaaatccaggtagttctcaacactgtcacatctggtggcttgagggactaa

SEQ ID NO: 1549 - DNA, 158 bp, Homo sapiens
ggccgccgtacttgatggagatgaggtagctgccaggtgccatgggggtataggtgacgcggtagccctcagggcactcctggcaatccatcttcaccttggaggggccgtcaatggtcaccgacagggcaccagctcccgcattgctcgtgttcacg

SEQ ID NO: 1550 - DNA, 177 bp, Homo sapiens
cgggcacgccgtcataggtcacctccacctcatagggcccttcctcacggggcaggaagcgcaccacactgttgtcagcccccaggcctggctccaccttgcagggcaccgctgcacccgaggggcccacaatcttggatgccactttgccttgaccaccagcaccctttgatttga

SEQ ID NO: 1551 - DNA, 25 bp, Homo sapiens
cgctggtgctgtggtcgagtgaccg

SEQ ID NO: 1552 - DNA, 109 bp, Homo sapiens
agcgcccaggtcccagtgaaggttctcaactgtgacagcatcacccaggccaaagataagctgctggacactgtgtacaagggcattccgtactcccagcgtcccaaag

SEQ ID NO: 1553 - DNA, 31 bp, Homo sapiens
aggtcagggcccacgaggatgcggaggcaga

SEQ ID NO: 1554 - DNA, 129 bp, Homo sapiens
tggtttcctcagtggctacggcattagtgtttgggtcatctcttggcaaagaggagctggcagcatgggcggtaagaagggagctggcagaggatggctgcagggaggagggcgtgtaagagaggctct

SEQ ID NO: 1555 - DNA, 69 bp, Homo sapiens
ctttgtcttcaggacacgtgtgggtaaattcttcacgggcataggcattgtggagataacgccagactc

SEQ ID NO: 1556 - DNA, 139 bp, Homo sapiens
acgcggccaccgagctggaggaggcggcgggcgtgagaccgggaatgcttggggcccccgccttcctcgcagccatccagcactcggtgcacgccccgcgaggccagcggctgctccctcccggggctattgctgctag

SEQ ID NO: 1557 - DNA, 25 bp, Homo sapiens
gtagtgcaatctccagtggtcttca

SEQ ID NO: 1558 - DNA, 69 bp, Homo sapiens
tgcggcggcgcctgacaatgccccctcgcgccccggcctcggcgcccgctcccggctccagcgcgcctg

SEQ ID NO: 1559 - DNA, 35 bp, Homo sapiens
atgccatgccagagcccgacgtccttcttgaaatc

SEQ ID NO: 1560 - DNA, 203 bp, Homo sapiens
ctgacaaggacgagcccgacctcgatggggatgtgtccagcgactgccccaccatccgcgtcccactgacatccctcaagagccaccagggcgtggtcatcgcctccgactggctggttggggggaagcaggctgtgactgcctcctgggaccggacggcaaacctgtacgacgtggagacgtccgagctcgttcactctctg

SEQ ID NO: 1561 - DNA, 55 bp, Homo sapiens
atggtggacggaggctcaaacatcgcagaggccgactgggagagtgtctccagca

SEQ ID NO: 1562 - DNA, 97 bp, Homo sapiens
ggtgagtgccttggcctgcggtgcggactgggtgttccttccagaatctccaccagaggaaggctgggaggagcagatgtgtgtcaaactctcggag

SEQ ID NO: 1563 - DNA, 32 bp, Homo sapiens
caggagaatcactggaacccagggggtggagg

SEQ ID NO: 1564 - DNA, 71 bp, Homo sapiens
cacgagaatcgtttgagcctaggaggtggaggttgcactgagctaagatcgtgccactgcactgcagcctg

SEQ ID NO: 1565 - DNA, 47 bp, Homo sapiens
tgggagcccgggacaatagctgctgttgtggccgctgtgttgtttga

SEQ ID NO: 1566 - DNA, 246 bp, Homo sapiens
agggacggcttcttctatctcgaatttttgcatttgtagggaattttatggggtagaggagcgaagagggaacaatgtctccaattcaaataaaaccccaaattaagctctcagccccatcggtgggatagcctgcgggggaacccactccctctcctggcagcattgccctgggggcgagcagagagtggatttggagtcttcttttcccgcctgacccctgctcgcccgagcagcattttcggg

SEQ ID NO: 1567 - DNA, 30 bp, Homo sapiens
gcatcaccgtgcagttcgcgggccgcggct

SEQ ID NO: 1568 - DNA, 24 bp, Homo sapiens
tgggagcatataagggaaattgga

SEQ ID NO: 1569 - DNA, 108 bp, Homo sapiens
agaggagttcaaacgtggaggccagactaaatccaggtcctggggctcttcttttagtttctctccttctttgccaactcgctgatagatccgcccagtgctgtcgtt

SEQ ID NO: 1570 - DNA, 56 bp, Homo sapiens
tggcggccatcggagttcacctgggctgcacctcagcctgtgtggccgtctataag

SEQ ID NO: 1571 - DNA, 25 bp, Homo sapiens
tggacgaatcaggagccagtagatt

SEQ ID NO: 1572 - DNA, 52 bp, Homo sapiens
acaacaacaaagcacgtgggcgatgacagcaagcgcagaggcggaaaggcaa

SEQ ID NO: 1573 - DNA, 128 bp, Homo sapiens
cgacactgatgcggtgaccgtggtgtggaaacccccagcactgatgctagaatcagagacgaatctcagcgtcagggcgctgctgaaggatgtgataggatggggcatgtcggtgccacagtaacggc

SEQ ID NO: 1574 - DNA, 30 bp, Homo sapiens
tccccggggacacctcggcacgcagcggag

SEQ ID NO: 1575 - DNA, 42 bp, Homo sapiens
tgcttgacagacgccttatagctcctcaaactaaatacatta

SEQ ID NO: 1576 - DNA, 75 bp, Homo sapiens
ccagtttaacagatgtggcccctgtgtatcttctcagattggcttcaactgcagttggtgtagtaaacttcaaag

SEQ ID NO: 1577 - DNA, 84 bp, Homo sapiens
taccacaggggctgtaagacctagtgaccctcctaagtgggaaagaggaatggagaatagtatttctgatgcatcaagaacatc

SEQ ID NO: 1578 - DNA, 24 bp, Homo sapiens
aagatatgttttgctcgttcatat

SEQ ID NO: 1579 - DNA, 29 bp, Homo sapiens
agtttggtgatacccccgtgctgcctcac

SEQ ID NO: 1580 - DNA, 68 bp, Homo sapiens
aaacggccccggccagcgggatcatggagaaccgggggttcggtccccactcgccaaccgctgccggg

SEQ ID NO: 1581 - DNA, 92 bp, Homo sapiens
ataggtccgccgacgatcttctacatcttcatcttgctttgcttgctgaaattcttgcctcagacgctgtatccgatcatgattgctaggag

SEQ ID NO: 1582 - DNA, 87 bp, Homo sapiens
gaaatcgtgcagtgaacctgtcccctccggtcacaacatcaagagctgaactgggactagaagtcatcgccccagagctttttgcta

SEQ ID NO: 1583 - DNA, 160 bp, Homo sapiens
tccctgatggataatgaaagctgaattgtcacagaagatttccccatattcattatattcataaggattgtcctttgtaagagctctctgatgtccaaaccttaaattcatgcagaaggacttcccgcaaatactgcatccatacggctccatttccaaa

SEQ ID NO: 1584 - DNA, 127 bp, Homo sapiens
atgtcagacccgaactggcctggagagagtcctgtaccactcacgagagctgatggcactaacactgggtttccaagatatccaaatgatagtgtatatgctaactggatgctttcaccctcagcgg

SEQ ID NO: 1585 - DNA, 35 bp, Homo sapiens
tcagggtgggtgtcaggtgatcttgggtgtggctt

SEQ ID NO: 1586 - DNA, 25 bp, Homo sapiens
accatggatggcctattattattat

SEQ ID NO: 1587 - DNA, 65 bp, Homo sapiens
ctaattactcagttggagcaaggggcagagccctggactgaggtgcgagaggctccatcaggcac

SEQ ID NO: 1588 - DNA, 304 bp, Homo sapiens
aatgccaccacaggacgtatgagttgtagccagcagagtgccccagtggtgccaggtgacagtcccccggaatacattagtgcatttgctaagactccatgtgttctcttgggcctcacagaacatgggctttgagggtgggagccaagaggcagacttgggagtgcccgaggccttgttctgaaacacctggggggctgacacccccactaccctcacacccctaccaccagtttccccaccagcgatgatggtagctactcagccagtgggctcctatatgcggttacacgtcagaatggcc

SEQ ID NO: 1589 - DNA, 67 bp, Homo sapiens
caccgactgccaagggcgtggtgaccattgagcagatcgtggacacgctgcccgaccgcggccgctc

SEQ ID NO: 1590 - DNA, 26 bp, Homo sapiens
tgcatcccggggtcgtgtgcatcatg

SEQ ID NO: 1591 - DNA, 111 bp, Homo sapiens
agatggagcatcgtggcgacagcagtgggttatcaccatcagtgatgtgatagagcagcctgctggtccccacagagtggaggtcttctggtgcactgtcggcctcattct

SEQ ID NO: 1592 - DNA, 29 bp, Homo sapiens
gacatctcctcaaataggaagcccaaatg

SEQ ID NO: 1593 - DNA, 154 bp, Homo sapiens
tcctcgatgtcctaggtgcccagctgatgaaccgcttgctatcatgaaaccagagattgtgttttttggtgaaaatttaccagaacagtttcatagagccatgaagtatgacaaagatgaagttgacctcctcattgttattgggtcttccctc

SEQ ID NO: 1594 - DNA, 80 bp, Homo sapiens
actctctgctcattgacccactcactcagcgcgacgcagggacctataagtgcatcgctaccaacaaaaccgggcagaat

SEQ ID NO: 1595 - DNA, 132 bp, Homo sapiens
agaatccaggacttgaatcgtatcttcccactttctgaggactactctggatcaggcttcggctccggctccggctctggatcaggatctgggagtggcttcctaacggaaatggaacaggattaccaacta

SEQ ID NO: 1596 - DNA, 73 bp, Homo sapiens
accacaacctgacactgggcaagatggcccacctgtggcatcccaggttcctgccctgtaaagaggagtctgg

SEQ ID NO: 1597 - DNA, 24 bp, Homo sapiens
tgcagcccatcagggacccacagc

SEQ ID NO: 1598 - DNA, 34 bp, Homo sapiens
cacacgtggtctgcagcattacgggcgtgccatt

SEQ ID NO: 1599 - DNA, 69 bp, Homo sapiens
gcgtcggtaagcagcagtgggccggccacgttgctgagcaccccgcagctcagcgtgttgagaaagatg

SEQ ID NO: 1600 - DNA, 25 bp, Homo sapiens
cgcccattccgcagcgggaggcggc

SEQ ID NO: 1601 - DNA, 89 bp, Homo sapiens
ggcatgtgtcaccccctgaggagctgtgccctcaaccatgaggatggcttctcctcagccttcgtgatagctcatgagaccggccacgt

SEQ ID NO: 1602 - DNA, 140 bp, Homo sapiens
gaggtctacgccacggacaaggatgagggcctcaacggggcggtgcgctacagcttcctgaagactgcgggcaaccgggactgggagttcttcatcatcgacccaatcagcggcctcatccagactgctcagcgcctgga

SEQ ID NO: 1603 - DNA, 53 bp, Homo sapiens
gtgtctttctgcaatatcgtgagggaagccgaggccctgaatcatcaaagaga

SEQ ID NO: 1604 - DNA, 28 bp, Homo sapiens
atcacaggcacctccgtgtcacccgtgg

SEQ ID NO: 1605 - DNA, 51 bp, Homo sapiens
agctcctcctgtccgacgggtaagaggaggccttggaggaatcatttcctt

SEQ ID NO: 1606 - DNA, 75 bp, Homo sapiens
gcttggcctatggcccccggagtttgaacagtgtccccaggagagaagttgaggtgctcgaaccccgtctgggct

SEQ ID NO: 1607 - DNA, 37 bp, Homo sapiens
tccatcccctccacgaggttaccaagggcctcaggct

SEQ ID NO: 1608 - DNA, 24 bp, Homo sapiens
agccttggaggagcactggcagtt

SEQ ID NO: 1609 - DNA, 140 bp, Homo sapiens
cttcgtccaggtacttggccggcaccacggccctgatgacttgctccttcagggccctgcgcatctcctccagcgtgatgtcttcgttgtgctgcacagagatgacgatggtgtggatgcgcacagggatgactgcgcca

SEQ ID NO: 1610 - DNA, 29 bp, Homo sapiens
ggagttgtcttccttggagtcgggctgtg

SEQ ID NO: 1611 - DNA, 36 bp, Homo sapiens
attctcagaaatcctccctagaccattttccctctc

SEQ ID NO: 1612 - DNA, 32 bp, Homo sapiens
gcccactggcttcggggagctcgaggtgctgg

SEQ ID NO: 1613 - DNA, 69 bp, Homo sapiens
tcccccgggcgcgcggctcatccacccgggcccggggcgaggccgagggcagcgcgaagcggggaggcg

SEQ ID NO: 1614 - DNA, 84 bp, Homo sapiens
ccagctacagtgagggccccgccgcccctgcacccaagccccgggttgtcaccactgccagcatccggccttctgtctaccagc

SEQ ID NO: 1615 - DNA, 26 bp, Homo sapiens
gcaccttctgcttgacctggtacact

SEQ ID NO: 1616 - DNA, 35 bp, Homo sapiens
aggactgccgctacgccccttatgacgccaccaag

SEQ ID NO: 1617 - DNA, 64 bp, Homo sapiens
ggtctctccccttctactgcctccaacacggcggcggcggcggctggcacatccagggacccgg

SEQ ID NO: 1618 - DNA, 110 bp, Homo sapiens
tgacatgagtaaaaaactgtactcttgctgcaaacagcaacagaggcaagtctgtgcccattctttggtcaaagatgaatagggagacacccgcttaatgtcttctttct

SEQ ID NO: 1619 - DNA, 30 bp, Homo sapiens
ggcgacagcgacgctcgcagcttcggagga

SEQ ID NO: 1620 - DNA, 58 bp, Homo sapiens
agagcaacctcgaacagtcatcaaagcaccccgcgtcagcactgcacaggatgtcatt

SEQ ID NO: 1621 - DNA, 91 bp, Homo sapiens
atcgtctatattgaggaggtccccaaagcgctcattagtgataaactgatggtgcgtcggaatgacgcctgtgtggcgtcgagctgcaata

SEQ ID NO: 1622 - DNA, 24 bp, Homo sapiens
tgcatggaagttggaagaatatat

SEQ ID NO: 1623 - DNA, 88 bp, Homo sapiens
gtgaaccggcctggtttcctgctctactggaggcggctcgtagctgtcatcagcgttctcctcggcgggcatcacgtacatctctgag

SEQ ID NO: 1624 - DNA, 58 bp, Homo sapiens
tgagaagagactattcagatagcaccaacccaggccccccgaagactccaccaattgc

SEQ ID NO: 1625 - DNA, 146 bp, Homo sapiens
cgtagccgtcgtaggcttccatgtagtcgtagccgcagtcggcctcctcctcaacctcaaaggtccggaatgtcagctccacgccgtagccgtcctctgccacgatcacccagtcacagcgggcctcgctcgggtagttgttgtcc

SEQ ID NO: 1626 - DNA, 137 bp, Homo sapiens
cacttcaaactgaagggagatccggtactgagcgggggccaccacctgccagacacagtttttgtttgtgggatactccttcggccacccagggctggtgatggttccattcagcttggtaatgaaaccgccacagg

SEQ ID NO: 1627 - DNA, 205 bp, Homo sapiens
atgcggtcaggtccgctgcggcctcccccgggcccaggggcgcttgcggggcccgtggctgcaaccgcggcgacggctcgttggagtctccgcacggcttccttgatgaggtttcccgagagcacgagctgctggaggagccgatgcgggtcgtcgtcgccggcgcgtgccccggcttgggtccatcggcgctgctgcaagcggc

SEQ ID NO: 1628 - DNA, 58 bp, Homo sapiens
tcagaaacttggtgacgagggtgtccacgtgaagactcatgacttggggtgcttccag

SEQ ID NO: 1629 - DNA, 115 bp, Homo sapiens
cactctgccctatcctcaggatggccactgcagacaggaggctctcgtcatggggaacagtggcaagcaagggtggctggaggacaggatgcaaaggcagactgcggccaccttg

SEQ ID NO: 1630 - DNA, 75 bp, Homo sapiens
agggtgctggccacaattcgtgctccctgggcggggggattggaccaagtaatccgcacgatcttctccatctgg

SEQ ID NO: 1631 - DNA, 91 bp, Homo sapiens
tgttaccaagcccggtcacctccacccctttctcagtcaaagacattttgaatctggagcagcagcaccagcacttccatggtgcgcactt

SEQ ID NO: 1632 - DNA, 138 bp, Homo sapiens
caggtctgagtcccgacaatccatttctggatccctgcctgccagtgggactcacagatgtggtggagaggaacagccaagtcttacatgtccgaggaagaggagactgggtgtcttgtggggcaatgctgagccccc

SEQ ID NO: 1633 - DNA, 153 bp, Homo sapiens
agcagacgaggccacagagggcaagaacacgtcctttcatgccacggctgagccagccctttctccaaaagtaggcagcaggcaggatgtacacaaggcctacaaggcgaccccacattcggtgtgagtactccatgtaccagatgaacttga

SEQ ID NO: 1634 - DNA, 201 bp, Homo sapiens
caggtgcccactctcagctagaggaagagggagcagaggcacagcccagcctagccagcagagagcaaatggaaaggcgtctgagagcagctgtttccacacagcctgggctcctgccttttgtagggggatgtctgtgcctgctggggagggagcggatgagaggacagggtggggaaggaccatcaatcctgtcaggag

SEQ ID NO: 1635 - DNA, 34 bp, Homo sapiens
attcttcttcatttagtcggtgaagttagttgtt

SEQ ID NO: 1636 - DNA, 29 bp, Homo sapiens
tcagctgctgacaaacccctggcatttag

SEQ ID NO: 1637 - DNA, 350 bp, Homo sapiens
aaggtcagatagctctgggagcgcgtgatggggggccggggtcggctgagggccagcagcaaagccgtcttgggagactcagagagcgcagagtcaaggcggcggccgggatgggggccgtccgagcggatggcggtgtccctgaggatgactgtgggccgcacgctgcaccaggtctccacccggcctcccgcatcgggctccgtctgcatggctgtgtccgcccgcccccagcctgggccgcggctgccgggctcctcctgcccgaggcagatgtccatgcggtccgacggcagggagcccgagctgtagggggcgctggaggcgcacgaagagacgctggagctgct

SEQ ID NO: 1638 - DNA, 78 bp, Homo sapiens
ggatccgggcgctgcgttggctgcggcctggcaccaaaggggcggccccggcggagagcggacccagtggcctcggcg

SEQ ID NO: 1639 - DNA, 109 bp, Homo sapiens
cccagctccccagatgttggagaagagctccaagacaggcacgctctcactgatatggtccagcttccgcaaatgcccgctctccaggatctctatgattttctcagcc

SEQ ID NO: 1640 - DNA, 53 bp, Homo sapiens
cggcagcgccccagtctccagttctgagacaccttcactcgttccttcactgg

SEQ ID NO: 1641 - DNA, 248 bp, Homo sapiens
cctggcggcctactgtgctgtcggggctggggaagtccgggctgaggctgagtctgggaatgggcccggggtctgaggtctacccggaggtcctggagcaggagagggaacactaggcagcaggtgagcgcagagccggaggcagagcggagctgagcgcggagccgagccgagctgcctctctcctcccgccccctccccgcggctgtcaccgcctcctcccctctttggcgctgccgggattggct

SEQ ID NO: 1642 - DNA, 33 bp, Homo sapiens
tgagcttcggctcggagcactacctgtgctcct

SEQ ID NO: 1643 - DNA, 220 bp, Homo sapiens
acgctgctacctccgcaggcgggggacggcgcaggcgagggtagcggcggcactaccaacaacggccccaacggcggcggcgggaacgttgcggcgtcgtcgtccactggcggggatggcgggacccccaagcccacggtggctgtctccgccgctgccccggcgggggcggccccggtgcccgccgctgctccggacgccggcgctccgcatgaccgac

SEQ ID NO: 1644 - DNA, 377 bp, Homo sapiens
gaactcaggtgtgcctgacccaaagctttgctcttcatcacatttgtacctcctgatacctccgggccttctcttcccactggaagtgctgccacccaccaacatacaccttgttttttgctcatcctaatcctccctgacttcagggcccataccaactcctacctcctggaagagccctcccagcccaccttggcccacaaagatctgagcaactcctcccaaataattaagaggagggaaactggaccccagaagtgggaatagagggaaggatggataaaaaaggatggaatcatgccaagatcaaaatgaatccttagatgcttgggacttatgtctcagagctgagggcggtgctgagaaacctatctgta

SEQ ID NO: 1645 - DNA, 35 bp, Homo sapiens
attctctgcgtggtggaggtcttgtccgtaggttc

SEQ ID NO: 1646 - DNA, 38 bp, Homo sapiens
agtcctgctgaatgatccggtggatctttctgtgcagg

SEQ ID NO: 1647 - DNA, 29 bp, Homo sapiens
gacttccagaactcctcccatcatgtcca

SEQ ID NO: 1648 - DNA, 62 bp, Homo sapiens
agcggtggcgagccacagggcggcgaccgtgagctccgggagctgcgcaaaccacctggaga

SEQ ID NO: 1649 - DNA, 29 bp, Homo sapiens
aaggtcacgtcgctcgacgggcgccagct

SEQ ID NO: 1650 - DNA, 36 bp, Homo sapiens
ctggccgtggtcatcggagtgttcgtggtgtgctgg

SEQ ID NO: 1651 - DNA, 66 bp, Homo sapiens
cggctaccccttcatcatgatccccgacctgacgagcccctacctccccaacggatcgctctcgcc

SEQ ID NO: 1652 - DNA, 67 bp, Homo sapiens
aggtcctcgggcagtgctgtgaacttgtgatactgtgtcctgtagtcgtggtcgctggccagagcct

SEQ ID NO: 1653 - DNA, 158 bp, Homo sapiens
tgaagaagatcgacagctgcgagcgccgtttcctcggcggcccagcgcggccgccctcgccctcgccctcgcccgtccccgcgcccgcgccgccgcccggacccccgcgccccgccgccgccgccgccaccgccccgctggccaacgggcgtgcgggt

SEQ ID NO: 1654 - DNA, 84 bp, Homo sapiens
caggagggcgcactggggattggaggcgagggaagtgcagggcgcatcccaggcggcagggctcccagcatcggcagtcgccat

SEQ ID NO: 1655 - DNA, 127 bp, Homo sapiens
aatcttgggccttggatcaactgcccacccttgaaccaatcctggtggccccaggctgattggcagacctgaatcacctatcccatgcccagaactttggcttgaccaggctcatccaaaacaaggg

SEQ ID NO: 1656 - DNA, 95 bp, Homo sapiens
cttcgagaacgacagcagatggccagccgtccctttgcttctgttgatgtagctctggaagtgggagctgaacaaacagagtttctgcgagggcc

SEQ ID NO: 1657 - DNA, 286 bp, Homo sapiens
taattcgtcttgcaggagtcctgcaaattcaaacagttgggcttctccctctcttcataggagcacacaggcacgatggtctgtcgcctccgctctgtgcaggcgatgtcccggcaggagcagaagagcattccgtagctgtgcttggccgggaccttgtcaaagaactgccggagggccttgtggcacttgcggcggttgcagacatcgttggacacgctggtggtgcacggggtgatgtacgccgacctgtacttcttgcaaatgtcgtcgaggttgcaggcct

SEQ ID NO: 1658 - DNA, 72 bp, Homo sapiens
gtcccgggcaatgtacacccaagccgtgcaaaacattcgggttgttggggcggagacagctttcttaataca

SEQ ID NO: 1659 - DNA, 310 bp, Homo sapiens
agattgattgccacctgccctaaaaatttatccagacccaccagggacctgtgcataactataaggaaaagaatgtatttctctggacttccctgaattagcaatccaggtagctcgaaagaggcctcctccttccaaactggctcaagggttttctcagctacagaggtggagtacttttccttgcccagctgaattatagtgtatgtgtcattggtaccacttttgccttttggcttcagatctttggcttggagcactgtgacctgcacgtgggttggaaaccacttttgggcttgctcggacagca

SEQ ID NO: 1660 - DNA, 71 bp, Homo sapiens
atctgagtggaggtcctcttcggtccctgtcgtctcttagatctcgtctttctcttagatcacgccggtca

SEQ ID NO: 1661 - DNA, 47 bp, Homo sapiens
gtgcagccactgttaagccatgtgttccaaggcattttagcggggag

SEQ ID NO: 1662 - DNA, 24 bp, Homo sapiens
agaaggtgttattgggaaaattca

SEQ ID NO: 1663 - DNA, 103 bp, Homo sapiens
agaaaacctaacggtggcagcggcggcgcctccacttcctcatcgggcactaacttacttttctcctcctcggccacggagttcagcttcaatgtgcccttca

SEQ ID NO: 1664 - DNA, 75 bp, Homo sapiens
tcagtctcccaccagacggtgcagcagctggttctggagaaggagcaagccctggccgacctgaactccgtggag

SEQ ID NO: 1665 - DNA, 36 bp, Homo sapiens
tgaagagagatgagctacccacaccttctatgtctt

SEQ ID NO: 1666 - DNA, 24 bp, Homo sapiens
tgaagaccgccgagaacatcagag

SEQ ID NO: 1667 - DNA, 107 bp, Homo sapiens
gaccatccacctgatgggaagaaagctagaaaagcccaaccctgagaaaaatgcttgggaacacaacagcctcacaattccgagtccagcatgtgcttcggaggcca

SEQ ID NO: 1668 - DNA, 25 bp, Homo sapiens
cctggacggccgttggggccgccat

SEQ ID NO: 1669 - DNA, 28 bp, Homo sapiens
gcctccgcagctgcatttcggtcctgca

SEQ ID NO: 1670 - DNA, 139 bp, Homo sapiens
tcgtgtttggggagcccatcaccgccagcctgggcaccgacggttcacactactggagcaagaactgggccaaggccgcagccttcgtcacatcaccccctgtcaacccagaccccaccacggcggaccacctcacctg

SEQ ID NO: 1671 - DNA, 145 bp, Homo sapiens
atactgtagctgtctgcaggtaacaaactgcagaaagtgaactgcgggtaacgaggcactgccggtgtgatttacacgtccaataatgggactggtggaggatgttctggatcatcagcatcatgaaattttacgccgtccgtaa

SEQ ID NO: 1672 - DNA, 78 bp, Homo sapiens
ggcccttccgggagtacgagctgtgggccctgtgcctggcctgcctccgcgcactgcagacacgccctgagcacccag

SEQ ID NO: 1673 - DNA, 58 bp, Homo sapiens
ctccagcgaggcatggacagccggaaaatccttgcccacctcagagcttccatctgcc

SEQ ID NO: 1674 - DNA, 122 bp, Homo sapiens
gcttcagcggtgccgacatttccacactcgccgcagatagcagggccaacttccaccaggtctccagcgagaagcactcacggaagattcaggacaagctacggaggatgaaggctacattc

SEQ ID NO: 1675 - DNA, 33 bp, Homo sapiens
gcatcaaggaggccgccgggtcctcaaatctgc

SEQ ID NO: 1676 - DNA, 93 bp, Homo sapiens
cgaagcgttcctggcagcggcagccctggacgttctcatcatggtccatgcccaggttgtggcccatctcatgggccatggtacaggccacgc

SEQ ID NO: 1677 - DNA, 49 bp, Homo sapiens
ataccctctaccatctgctttggtcagggtgccgctcgaggatttaaaa

SEQ ID NO: 1678 - DNA, 45 bp, Homo sapiens
ccgtgccccatccgcgccagcgcgtagagcagctcgggggacagc

SEQ ID NO: 1679 - DNA, 104 bp, Homo sapiens
tgcttgcttggcgtcctgggctgagatccggtcaccagtgaggaccatctccatcgccagcgacttcccaacagcacgggtgagtctctgggtgccgcccgcac

SEQ ID NO: 1680 - DNA, 123 bp, Homo sapiens
agctggctgctgagtacgggctgctgggggagaaggagctgtcccaggagaaccagctggtggagaccgggggtcacgtgggcctgccctccgtgagctacgccagctccggggccagcgtga

SEQ ID NO: 1681 - DNA, 30 bp, Homo sapiens
agacgaggtgcagcgccgagccttcctctt

SEQ ID NO: 1682 - DNA, 26 bp, Homo sapiens
acggtaacttcctgctgtcggccctg

SEQ ID NO: 1683 - DNA, 103 bp, Homo sapiens
ccctcagcagtcaagtacctcatggcttcagaccccaacctgcaggtgctgggagcggcctacatccagcacaagtgctacagcgatgcagccgccaagaagc

SEQ ID NO: 1684 - DNA, 162 bp, Homo sapiens
gtggaacctttcatccagcgaccacctgaaggaccgcctggccagagacacgctggagcagctcacagacctggtgttgagccccctgtcgggggctgggggtccccccctcatccagcagaacgcctcggaggcagagatcttctacaacgccaccggctt

SEQ ID NO: 1685 - DNA, 149 bp, Homo sapiens
catccttggacaccaggcagtagaagtctgtgcgggcactgtagtttcgcgagccgagatccgagacgtccacttcgctgctccggctctctcccagcgagaccccactggtgtgcggtggagctgatggctctccaaagacaggcccc

SEQ ID NO: 1686 - DNA, 27 bp, Homo sapiens
ctgcccaacctggaccaactgaagctg

SEQ ID NO: 1687 - DNA, 39 bp, Homo sapiens
tgttttcagagaggtcgcttgggtccatcagagtctctg

SEQ ID NO: 1688 - DNA, 287 bp, Homo sapiens
ggtgtcacagttccgaggcagcaggcaggctggggtggaggggctggcggagcctgggggtccgcccacctcccagtacaccttgcacttgcccatgcgccgggcccacagctgtggcccccgaagctccaggtgcaacccaggggccacgtgccgcagcagttcctccgtgtagcgcagctgcttctggtccgggagctcggcagggctggggaatgctacctgctgggggtctgtggcccggacagctgggtctggggggccgtataggaacgtgcagctcgggt

SEQ ID NO: 1689 - DNA, 129 bp, Homo sapiens
ggtgtttgagaccaccggctcccaagtgcgtcgccttgggggtttgcatcggctcctcagcctccccaggcaatctctgtgtagggtcgggagcgggaggtctgagatgagccgggtgcctgagatctc

SEQ ID NO: 1690 - DNA, 26 bp, Homo sapiens
gggcatcggctgagaggttcctgcct

SEQ ID NO: 1691 - DNA, 47 bp, Homo sapiens
tgcaggatgggcatgttggaccctgacgggcagagcagacccgcgct

SEQ ID NO: 1692 - DNA, 25 bp, Homo sapiens
tttccgccgtcgggagtcgcaggag

SEQ ID NO: 1693 - DNA, 80 bp, Homo sapiens
cggcagtggtggaagctgcgcagccgcagcggccaggcggggtacgtgccctgcaacatcctaggcgaggcgcgaccgga

SEQ ID NO: 1694 - DNA, 34 bp, Homo sapiens
ggccaagcccatgcgtcggatgctgtcctggtac

SEQ ID NO: 1695 - DNA, 125 bp, Homo sapiens
cagctgcacggtgaccggttggaggaagctggggggaccgctctgtgacaggcacagcagggggctcactgcagcctctggttctcccaggagggcctgcagctctcggccagccatgcgcacca

SEQ ID NO: 1696 - DNA, 98 bp, Homo sapiens
ctggaagtgagcatgccccatttcatgagaaccaacagcttcgccgaggacctggacctggaaggggagactctgctgacacccatcacccacatctc

SEQ ID NO: 1697 - DNA, 36 bp, Homo sapiens
cccggatcaactggacttttgccccctgctccgcca

SEQ ID NO: 1698 - DNA, 70 bp, Homo sapiens
gtgttcgacctgaaggccatcgcctccctgctgcggctgccagacgtcccgaggatcttcctggtgaagg

SEQ ID NO: 1699 - DNA, 24 bp, Homo sapiens
tatatggggaatacatgtattaaa

SEQ ID NO: 1700 - DNA, 24 bp, Homo sapiens
acagaaggctttctctcaaggcca

SEQ ID NO: 1701 - DNA, 27 bp, Homo sapiens
tgctgatgtcttgctctctaccaccac

SEQ ID NO: 1702 - DNA, 73 bp, Homo sapiens
ccaggctgaaggaccaattgtgccgcctgccgggccctggttggactgtgtgcatgccgcaggagtaactccc

SEQ ID NO: 1703 - DNA, 24 bp, Homo sapiens
gggaaggtcaacgtcccctcctca

SEQ ID NO: 1704 - DNA, 76 bp, Homo sapiens
ccagcaatcattcccaggtgatcggccagtgtttttttaggctcactcgtctggtctggtctgattccaagattcc

SEQ ID NO: 1705 - DNA, 86 bp, Homo sapiens
cctggtggctccatcggccgcgttcatcagtcagcacgacccgacctcagtggcgtcctcacaacacagaccggaccttgggtctt

SEQ ID NO: 1706 - DNA, 188 bp, Homo sapiens
cctccctgctgaggcggccctccctcctcccgcggggccctcctggccggggatccgcagcgctgcgccctctgaacgcccggcccccgcgcctgctgcggggcgcggcctggccgggccctggccccggctggcctcagtgcccagcagccccgctccgctctgcccagcgcgtcccctttgctcca

SEQ ID NO: 1707 - DNA, 31 bp, Homo sapiens
gcccaatcggccatccaaggtctttcctgca

SEQ ID NO: 1708 - DNA, 24 bp, Homo sapiens
gattgaagatgtccccacactcct

SEQ ID NO: 1709 - DNA, 74 bp, Homo sapiens
gcgacactgagtctccagtcccgagaggtgcccgagggaaaaggaggcggcagctaaactggtcctggagagaa

SEQ ID NO: 1710 - DNA, 116 bp, Homo sapiens
ttgaacaggaagtatcactggacctgattttagtagaagagtatgactcattaatagaaaagatgagcaactggaattttccaatttttgaacttgtagaaaagatgggagagaaa

SEQ ID NO: 1711 - DNA, 134 bp, Homo sapiens
caatggggctagggatgctgcttttgtttggcagattgacagggctggttttgctggctgggaagaggttctgggtgggagacgttggggactttacaggctctgctgtcttgggtcgggatgagagattcaga

SEQ ID NO: 1712 - DNA, 24 bp, Homo sapiens
gatctgtgaaggagtaaggccctt

SEQ ID NO: 1713 - DNA, 48 bp, Homo sapiens
ggcgactccgacgcgtccagcccgcgctccaactgctccgacggcatg

SEQ ID NO: 1714 - DNA, 25 bp, Homo sapiens
aaatagcagccaccgctccctggca

SEQ ID NO: 1715 - DNA, 24 bp, Homo sapiens
cttgttgtgagtcaagtgatcagt

SEQ ID NO: 1716 - DNA, 31 bp, Homo sapiens
aggccggtcccgagctaggtcccaggactcc

SEQ ID NO: 1717 - DNA, 581 bp, Homo sapiens
aacaggtttgtcgtggccctcacgaagtgagggttgggagctattgccagatcctgccttgatcctctctcctggcatggatttggatgaagacaaagcgaggtgtttctcattggccatgctgggtcttgatttcttctcagcatgaggaaggggcattcctttggaagaaggatgcctgtctccagaacctttgctaagttttgtgcccacactttctttctgagagggtgcctttttggacacagttggaggtagttttccatctgtctcaagtttttttctcctatgctttcgttcaaggaattctcgctccctaagttcttctgcggtcataggtcgctcttctgatttcttcactaccttgatttccactggttcaaactgctttttctcagccagcctgagtaaatcagtgaagttcatgggtggtggggcacttttaagggggacctttggtttgctttcaactttgggaggttcttgctcttcctcatactcctgctctgactctgcgtgattgtactcgaggaattcattctcttcttccatttcatactctcggtcggttccttggctgg

SEQ ID NO: 1718 - DNA, 26 bp, Homo sapiens
cagcaggtgccagtcactccccaagc

SEQ ID NO: 1719 - DNA, 30 bp, Homo sapiens
gacccgcaccttgataggaacactttgcct

SEQ ID NO: 1720 - DNA, 33 bp, Homo sapiens
gaaagagcaaaatgatccgagacctccagaatg

SEQ ID NO: 1721 - DNA, 31 bp, Homo sapiens
aagctgctctgccggtagtgggctttcttct

SEQ ID NO: 1722 - DNA, 124 bp, Homo sapiens
ttgtctccattgccgccttctgtggaggatgcaggattaccttcttatgaacaggcagtggcgctgaccagaaaacacagtgtttcaccaccaccaccatatcctgggcacacaaaaggattta

SEQ ID NO: 1723 - DNA, 26 bp, Homo sapiens
aaaaatctatgtctctcccatctcac

SEQ ID NO: 1724 - DNA, 24 bp, Homo sapiens
ctgacatctaacctctcctccctg

SEQ ID NO: 1725 - DNA, 32 bp, Homo sapiens
tgtgcgcgactcggggtgattcacgccgggga

SEQ ID NO: 1726 - DNA, 132 bp, Homo sapiens
tgacccgcggcttcgctcccattctgcccgtcgagttccacaagatgggctccttccgcaggcctagaccgcgcttcatgagctcccccgtgctcagcgaccttccccgattccaagcagctcggcaggctc

SEQ ID NO: 1727 - DNA, 68 bp, Homo sapiens
atgtcctgcgcctcagggtccggtggtggcctgcggcatcccttgcggtgccagaagccgtgggacga

SEQ ID NO: 1728 - DNA, 55 bp, Homo sapiens
cgcagtgatcctgggcttcggggtgtggatcctggccgacaagagcagtttcatc

SEQ ID NO: 1729 - DNA, 25 bp, Homo sapiens
ctcctggaccaccctcaagcttcag

SEQ ID NO: 1730 - DNA, 60 bp, Homo sapiens
cagatgggggattgaggcttcggcctgagggcactgcccattggcggcaccacctgtggg

SEQ ID NO: 1731 - DNA, 38 bp, Homo sapiens
gtgccacatggcaatctgccggcgagggtttttgagca

SEQ ID NO: 1732 - DNA, 78 bp, Homo sapiens
ctgtccagtggaacgatagggggtgaagtctggaggccagccttgaaccagagcagcaggagcatccgcagtacagcc

SEQ ID NO: 1733 - DNA, 96 bp, Homo sapiens
tggccagctggacgagggcgatgacaagccagcggcccacttcaccccacaccttggcagctcccatctccatgaacacctccacgcactccagca

SEQ ID NO: 1734 - DNA, 123 bp, Homo sapiens
tggatgccagaagagcgggaggacagcatgtgcaggaaattgtggaggagaggcgtccggcgaactggctgtgattgcaggagggcacgctgacggtagtgggataattctgttccatctatg

SEQ ID NO: 1735 - DNA, 57 bp, Homo sapiens
tgcacttcccggaccacttgggtgttggccgacctccggaagatgccctcggtggtg

SEQ ID NO: 1736 - DNA, 117 bp, Homo sapiens
tgaagaaaagaagccgctggcgctcggcggcctggcaggtctcaaaggcctgttccatgtcctccatgtagcgtggagtgtagcgatgcagctctgccagcgtctgctcatactgag

SEQ ID NO: 1737 - DNA, 127 bp, Homo sapiens
gcgttccacccgttcctgcagtttgcgcagctgctcctgggagacggcgctgtctgcctttgcgtggctctccctcgtctgggcggtcttctcatccttccgggctgcgtggtagcttttcttggaa

SEQ ID NO: 1738 - DNA, 50 bp, Homo sapiens
atgcagaagtgctgcctatcctgccagaaccagaatcactagagctgaaa

SEQ ID NO: 1739 - DNA, 40 bp, Homo sapiens
acagcatggagcgcgctgccgcccgacagcaaagcatcaa

SEQ ID NO: 1740 - DNA, 189 bp, Homo sapiens
agtgtgtagaccacgggatttaacattgggaccaccatagtataaaatacagcaacagctttatcaatgggcagagtggtcactgagcgcagatacacaaatatacagggcacaaagaataagacaactactatgatgtgagaaatacaggtggagagggctttacacctcccctccaagctattgttc

SEQ ID NO: 1741 - DNA, 24 bp, Homo sapiens
taaatcgtttaagaatagtcaata

SEQ ID NO: 1742 - DNA, 280 bp, Homo sapiens
gctgccataggtgccgagtgacacatctctcttctgaaactcccagtcctgctcatcggcatcctggctgctgtacctaccatggtggtccctcttccccaaatcttggccctgctcgttggcatcttggctggcataagcacccagagaatctctcttcccaaattcccagtccccaaggcttacatctcgactactgtaggtacccagtgaatctctctttccgaattcctggtcctggagttctgcatcccggctggagtaagtgccctgggaatcc

SEQ ID NO: 1743 - DNA, 126 bp, Homo sapiens
cctcgtcaggcagggctgcacttggagctgatggagtcacagcggggcagggagaagcctgggaagcttcaggagtctgggcttccagaagctgtgagtggcagggagaactcttatcaggcgggt

SEQ ID NO: 1744 - DNA, 27 bp, Homo sapiens
tctctcccagtttcacactcccagagc

SEQ ID NO: 1745 - DNA, 266 bp, Homo sapiens
cttgttcgcggacctggccaacctgagccacctcttcctccacgggaaccgcctgcggctgctcacagagcacgtgtttcgcggcctgggcagcctggaccggctgctgctgcacgggaaccggctgcagggcgtgcaccgcgcggccttccgcggcctcagccgcctcaccatcctctacctgttcaacaacagcctggcctcgctgcccggcgaggcgctcgccgacctgccctcgctcgagttcctgcggctcaacgctaacc

SEQ ID NO: 1746 - DNA, 141 bp, Homo sapiens
cctggccaccagtcacaaggtactccagcatcttgttcacagcagccatgtagaagatgatccgcagctgggtcatgcccatggtgaggaggctccacaggaaagtgggggagcagaggctcttgcgtaaggggacagacc

SEQ ID NO: 1747 - DNA, 25 bp, Homo sapiens
ggccgtgttgggggatgctttggta

SEQ ID NO: 1748 - DNA, 63 bp, Homo sapiens
cccggcactgagggcaacggccgcgcgccggctccgagacgagcgacgcctggcgggagcgcg

SEQ ID NO: 1749 - DNA, 27 bp, Homo sapiens
aacaacggccccctgaggcggtcgcgg

SEQ ID NO: 1750 - DNA, 24 bp, Homo sapiens
gcttctttccctcaagaagatgat

SEQ ID NO: 1751 - DNA, 31 bp, Homo sapiens
cgcaggagcggcgcactagcgcgagccagca

SEQ ID NO: 1752 - DNA, 118 bp, Homo sapiens
cttcaagttgtaggctccggccagattcatggcaatcaggatgctggggtttgggtaggctgatgaagtcaccgagttctccatgagtacttgtattccattgaccaagggctcctgt

SEQ ID NO: 1753 - DNA, 32 bp, Homo sapiens
cgccgaggccgtgtgccgagcactgggctgcg

SEQ ID NO: 1754 - DNA, 33 bp, Homo sapiens
agcaatagctatcaaccggtccccatcaccatc

SEQ ID NO: 1755 - DNA, 179 bp, Homo sapiens
ggggacgctccttatcgtgaagaactacactggggatcggctcaacttcggcctggcccgggagcaggcccgggctgaaggcatcccggtggagatggtggtgattggggacgacagcgccttcactgtcctgaagaaggcaggccggcgggggctgtgcggcacggtgcttatacaca

SEQ ID NO: 1756 - DNA, 71 bp, Homo sapiens
ggctcccggagaatcagaaactcatacgttttcttggacaaagcaccattctctatggagaccaggggcct

SEQ ID NO: 1757 - DNA, 51 bp, Homo sapiens
tggccagaggctccaagcgggaaacagccttcagccgagggaatgaaagga

SEQ ID NO: 1758 - DNA, 26 bp, Homo sapiens
tggagaattcgatgtccatcacctcc

SEQ ID NO: 1759 - DNA, 30 bp, Homo sapiens
agccttccacagagtctccacacccaccag

SEQ ID NO: 1760 - DNA, 27 bp, Homo sapiens
gctaagcgcaaggagccagaacccaag

SEQ ID NO: 1761 - DNA, 84 bp, Homo sapiens
cagatctttgacgatagttgccaggggcagccgcaccagagggtgaatcttcaatggagtcttggcggccttaggaagtcgaat

SEQ ID NO: 1762 - DNA, 29 bp, Homo sapiens
tgctgaatataccggtctgtggttttcca

SEQ ID NO: 1763 - DNA, 96 bp, Homo sapiens
gtgggtggctggtaatgattcaaattgccgagaaagaaaaagttcccggtgcttcagttgatggcgctgctgctcagacacccctggctgctttga

SEQ ID NO: 1764 - DNA, 132 bp, Homo sapiens
ggctgctaactcctcggccttttccctccgcctctcctcagcagcccggcgcatctcatcttcctgtagccgctgtcgtgctgctgacaactcttgcccttgtctcctgcgctgccgttcccgttccaatgc

SEQ ID NO: 1765 - DNA, 38 bp, Homo sapiens
gtgaagggcacactgcacttgctctgaatcatgctcag

SEQ ID NO: 1766 - DNA, 27 bp, Homo sapiens
gctgtacgacttcccctcgtccgccat

SEQ ID NO: 1767 - DNA, 120 bp, Homo sapiens
agctgaatgagttagagcccgagaagcagccgatgaacgcggcgtctggggcggccatgtccctggcgggagccgagaagaatggtctggtgaagatcaaggtggcggaagacgaggcgg

SEQ ID NO: 1768 - DNA, 230 bp, Homo sapiens
atctgaggccattgacaaagtgctcacagttcccttcaatcaggctgtactgcacgatcttgttgaccatcttttttgtacgctggatgatcttgtccaccggcaagggcaggtacgtcccatctagcttgttattgaccttccaggagcagccatgcagcacatcctccagacgactgtatttcaccacggcccgattgctaaagatggaagtaatgctgcccacctca

SEQ ID NO: 1769 - DNA, 205 bp, Homo sapiens
agaggtcgccactgaggttaggagaggcaggaggtcagcgtggctagggtccggcggggtgggagcccacctggtagccccagcgctctccacgacccccacgagccagggcgtcagaaaagtttgtgcagaagtgggggacgcaagggatgagcgcaaggtccggtgcggctggggcgtgattactatgtacgcccctcagggt

SEQ ID NO: 1770 - DNA, 24 bp, Homo sapiens
aagccaagcgaacctatgaggagg

SEQ ID NO: 1771 - DNA, 82 bp, Homo sapiens
gccccgcaccccagatcgctggtgcgccccgcagggtggtccgggaggcagggccgacgtgccgacggaccgggcggaagcg

SEQ ID NO: 1772 - DNA, 103 bp, Homo sapiens
ataccactacgtctgcctgcggaacgaggccaaccaaccgctgtgcctgccggccctgctcatctacaccgaagcctcggactacattcctgacgaccaccag

SEQ ID NO: 1773 - DNA, 46 bp, Homo sapiens
gggtgtgctgtttggagttcctggggccttcacccctggatgttcc

SEQ ID NO: 1774 - DNA, 32 bp, Homo sapiens
catgatgctgtcggggcaggtccccttccagg

SEQ ID NO: 1775 - DNA, 92 bp, Homo sapiens
ggctgccagaatccgcccggtggctgattattaagggcaaaccagaccaagcacttcaggagctcagaaaggtggccaggataaatggccac

SEQ ID NO: 1776 - DNA, 26 bp, Homo sapiens
gcacgaagggggatcgggtggccacg

SEQ ID NO: 1777 - DNA, 77 bp, Homo sapiens
cagccccacggatgatgcccaggacgttggaagagttcctcagctccaggcggttgtagacgctcacattcacctgg

SEQ ID NO: 1778 - DNA, 151 bp, Homo sapiens
gctcctggcggcccgttcgggccccgcgcgcctgctgggtccacccgcgtccctgccggggctggaggtgctgtggagcccacgggcgctgctgctgtggctcgcctggctcggcctgcaggcggcgctctacctactgccggcgcgcaag

SEQ ID NO: 1779 - DNA, 28 bp, Homo sapiens
agatgggacgacgaagactggggcagcc

SEQ ID NO: 1780 - DNA, 116 bp, Homo sapiens
ggcactggcgctgcgcgggactgtactcggcagggggcgtgcaggcacagcggtagccgccgcgcgtgttctcacacactccgttccggcagttggactcgtccaggcactcgtcc

SEQ ID NO: 1781 - DNA, 125 bp, Homo sapiens
atcagaacttcttcgggatggacgagtcgctgggcccggtggcagtgagcctgcggcgggaggagaaggagggcagcggagggggcaccctgcacagctaccgcgtcatcgtgcggaccacgcag

SEQ ID NO: 1782 - DNA, 62 bp, Homo sapiens
gagataatcgagggctgccgcctacccgtgctgcggcggaaccaggacaacgaagatgagtg

SEQ ID NO: 1783 - DNA, 134 bp, Homo sapiens
ggcactggccgactacgagaatgccaacaaggcgctggacaaggcgcgcaccaggaaccgggaggtgcggcccgccgagagccaccagcagctgtgctgccaacgcttcgagcgcctctccgactccgccaagc

SEQ ID NO: 1784 - DNA, 114 bp, Homo sapiens
cacaggagcggttgttaggccccagctggaagcccggctcgcactggcagcggaaggagccaggcaggttcacgcagcggtgctggcagtagcggtagcggcactcgtctatgt

SEQ ID NO: 1785 - DNA, 52 bp, Homo sapiens
aattgcgcagtacctggccacttatggccccatcaccgtgaccatcaacatg

SEQ ID NO: 1786 - DNA, 36 bp, Homo sapiens
ggctggagcggagggacttgctgggggttggattgg

SEQ ID NO: 1787 - DNA, 82 bp, Homo sapiens
gctggctttctagagtgtgtgggggagagcgtggggagcagcagtgactgttaatgcaggaacggtaatttctgatggtggt

SEQ ID NO: 1788 - DNA, 36 bp, Homo sapiens
gatggagaccatccaggctagtacggtgaaacccca

SEQ ID NO: 1789 - DNA, 285 bp, Homo sapiens
agtctgatccctccgaaaaccgtacttccggcgctgtctcggaggcctcccgtcccctcccttgtccgtcttctaactcttccccacgccaggtccgtcaagcctaagtccttgagttccgggtccgggcagcagagaaaggaagtcctctccctggaggcctatctccctcagaactgcgcgagaagcgagaccttagaaggcagggcttcccgcgaaggaccggaaaggagcgcctactaaggacgccgtcgaggtccggggcgcctcaactctatagctcta

SEQ ID NO: 1790 - DNA, 39 bp, Homo sapiens
tgaggatggctgcgatggacggcaaggactggcccaggg

SEQ ID NO: 1791 - DNA, 46 bp, Homo sapiens
cagaagtcaaagaagtacgagaggcccagggcgatgatcttgagca

SEQ ID NO: 1792 - DNA, 35 bp, Homo sapiens
ctttccccaaggtagcacatctggctcactcccca

SEQ ID NO: 1793 - DNA, 59 bp, Homo sapiens
cgaggacggcgctggcgacggcggggaggtgcccgcgctcatcccggacggcgagccgc

SEQ ID NO: 1794 - DNA, 138 bp, Homo sapiens
tactgccgaaagcgctcgtcgaaggtgggcaccttgcctcctgccacgtagaatggctcccaggggtcctgccaaggtaccacgtaggcgggccgcagcaagctctcttccggcaggttgacccagcgggaatagttg

SEQ ID NO: 1795 - DNA, 34 bp, Homo sapiens
caccatggctgtgatggcggggaagacggacagg

SEQ ID NO: 1796 - DNA, 60 bp, Homo sapiens
actacgctccctgctggaggggttgctgcagagggatgtcaaccggagattgggctgcct

SEQ ID NO: 1797 - DNA, 29 bp, Homo sapiens
tggagcaggcgatccgtgctgagctgtgg

SEQ ID NO: 1798 - DNA, 62 bp, Homo sapiens
tgaagtcccgccagtcagtggttaccctccagggcagtgccgtggtggccaaccggacccag

SEQ ID NO: 1799 - DNA, 29 bp, Homo sapiens
ctcgtggagtcagaccccaaccactttgc

SEQ ID NO: 1800 - DNA, 111 bp, Homo sapiens
ctgtggctcagtgggcgtgaagctgcccggccgctcctcgcagagagctgccgcgaaggacgagagcacggagcgcagcagggtccggaggtcggcactggccatgaggca

SEQ ID NO: 1801 - DNA, 120 bp, Homo sapiens
acttctggtagcggggcacggtcagtggggcgatggcctggaacttcggggccagcaggggctcgaggcgtgaggcgcaggggtcagccgcgtggaagaggttgtagatctgttcacagg

SEQ ID NO: 1802 - DNA, 30 bp, Homo sapiens
ggatccagtgggcctacaccagcaagcact

SEQ ID NO: 1803 - DNA, 49 bp, Homo sapiens
aggacacaatctggcgcatccactgggcacccttggctggcgagtcggg

SEQ ID NO: 1804 - DNA, 183 bp, Homo sapiens
cctgcagcaccgacgtgtgtgacagcgactacagcgccagccgctggaaggccagcaagtactacctggatttgaactcggactcagacccctatccacccccacccacgccccacagccagtacctgtcggcggaggacagctgcccgccctcgcccgccaccgagaggagctacttccatc

SEQ ID NO: 1805 - DNA, 115 bp, Homo sapiens
gaacgcgtgcaggacgggttccttggggtccgccgggcccaggtacgcttctttgaagacgtggaactcgtcctcctcgtacttcacgggggccttcaggccgatgttctccgaa

SEQ ID NO: 1806 - DNA, 24 bp, Homo sapiens
aacttggtccttgacttataatcc

SEQ ID NO: 1807 - DNA, 89 bp, Homo sapiens
agtcgcatgactcagtggtgcaggagcgcacggtctccgtcctcccctctcggaagagccgggtcatggaggcctcgtatgtgaggcaa

SEQ ID NO: 1808 - DNA, 24 bp, Homo sapiens
caatgctgtttatccggaggacag

SEQ ID NO: 1809 - DNA, 29 bp, Homo sapiens
tccagacctcgctgtttcggaggcggctg

SEQ ID NO: 1810 - DNA, 152 bp, Homo sapiens
ggtcgtggccctagatcctggacgcagcgctcctgctctgacggcgcggcggctccgggccggcagccttatatagtagcgccttacgggccccacgggtaggtgcccaagacacccgagcatttcttatcgggattgcatcaagcctccgc

SEQ ID NO: 1811 - DNA, 25 bp, Homo sapiens
gcagcccactctgtagctgccgcac

SEQ ID NO: 1812 - DNA, 41 bp, Homo sapiens
ggccagccgggcatcctgaccgatgggcaccctctcccagg

SEQ ID NO: 1813 - DNA, 91 bp, Homo sapiens
tttcggcggcaaatacggtatcgacaaggacaaagtggataagagcgccgttggctttgagtatcaaggcaaaacggagaagcacgagtcc

SEQ ID NO: 1814 - DNA, 26 bp, Homo sapiens
cccaccggatgaccgggatgcctcag

SEQ ID NO: 1815 - DNA, 72 bp, Homo sapiens
ggtcctagtccggctctcctgggtcctccgcggaggctccgacaacgtcgacgcggctgcagatgctgacgc

SEQ ID NO: 1816 - DNA, 1231 bp, Homo sapiens
gatccagcgcatgggtgcccaacaagatgatggaagcgatgccccccctggaagccctgactgggcaggggatgtgacccgagggcagcggtcccaggaggagctctcaggccctgagtccagtctgacagatgaaggcattggggcagaccctgagcctcctgttgcagcattttgcggcctgggtaccacagggatgtggcgacctctttcctcatcctcggcccagacgaaccaccatggccctgggactgaggacagtctgggcgggtgggccctggtgtcgcctgagacccctcccacaccaggtgccctccgccgacgacgcaaagtcccaccttcaggttctggtgggagcgaattgagcaatggggaggcaggggaggcctacaggtccctgagtgacccaattcctcagcgccaccgggctgccacctctgaagagcctactgggttctctgtggacagcaacctcctgggctcactgagccccaagacagggctccctgccacctcagccatggatgagggcttgaccagtggtcacagtgactggtctgtgggcagtgaagagagcaagggatatcaggaggttattcagagcatagttcaggggcctggcaccctggggcgtgtggtggacgacaggattgctggcaaagcccccaagaagaaatccctgagtgaccccagccgccgtggggagctggctgggcctggattcgagggccctggaggggagcccatccgagaagttgagcccatgctgcctccatccagcagcgagcccatccttgtagagcagcgggcagagccagaagaacctggtgccaccaggagccgggcacagtctgaaagggccctacctgaggctctgcctccccctgccactgcccaccgaaactttcaccttgaccccaagctggctgacattctgtccccgaggctaatccgccgaggctccaagaagcgcccagctcggagtagtcaccaggagcttcggagagacgagggcagtcaggaccagactggcagcctgtctcgggcccggccctcctccagacacgttcgccatgccagtgtgcccgccacatttatgcctattgtggtgcctgagccaccaacttctgttggtccccctgtggctgtgccagaacccataggcttccctacccgagcccatcccacgttgcaggcaccatcgctcgaggacgtcaccaagcagtacatg

SEQ ID NO: 1817 - DNA, 97 bp, Homo sapiens
agggcacattatgcaggccctgccccccaggcaccttctcagctgcatggggctccagcccatgccagccccatgcccgttgcagcctttggaggag

SEQ ID NO: 1818 - DNA, 62 bp, Homo sapiens
ggatgcccaatagatagaagacgggtgagccatccactgattcattacaggctgtggcatcc

SEQ ID NO: 1819 - DNA, 63 bp, Homo sapiens
tcagcctgccgctcttctttatcggctgctccagccaccagattgcgggcatcacacaccaga

SEQ ID NO: 1820 - DNA, 37 bp, Homo sapiens
gtgcattagggtgaagggcagttccacggccacgtcg

SEQ ID NO: 1821 - DNA, 55 bp, Homo sapiens
ctggcactgcggagaagttgagccccaaggcggccacgcttgccgagcgcagcgc

SEQ ID NO: 1822 - DNA, 190 bp, Homo sapiens
tcggaaaacttggcccccatgaggagcccgtagctgaggttgtccgcacatcctccccagcggttcccgggcccgggtggctcacctgggacggggccgcaggagcagccgggcaggtcgccggaggtgcaggcccgggcgatggcgtggctgatggcggcggccgacagcgcatacacgaaggccgact

SEQ ID NO: 1823 - DNA, 24 bp, Homo sapiens
gaccggggacaccgggtctcctga

SEQ ID NO: 1824 - DNA, 107 bp, Homo sapiens
cggcctggtaaagggccacgcatacgccgtcactgatgtgcgcaaggtgcgcctgggccacggcctactggccttcttcaagtcagagaagttggacatgatccgcc

SEQ ID NO: 1825 - DNA, 120 bp, Homo sapiens
ctctggacttataagcgcttaacataaacaacaacaagaaaagtatcgtggtagccttgcctatgagcctgcagtttttaatttgtctgagtcctggacctcagcctagatgtaaccttg

SEQ ID NO: 1826 - DNA, 40 bp, Homo sapiens
aagcaacttgaggggcgaggtgaggtcttactctctgggt

SEQ ID NO: 1827 - DNA, 84 bp, Homo sapiens
gacttgggtggctactacttcaggttcttgcctcagaaaaccttccagtctctgagctctaaggagatcaccagccggctccgc

SEQ ID NO: 1828 - DNA, 139 bp, Homo sapiens
gcggggactcggagaccgacctggaggcgctcttcaacgccgtcatgaaccccaagacggccaacgtgccccagaccgtgcccatgaggctccggaagctgcccgactccttcttcaagccgccggagcccaaatccca

SEQ ID NO: 1829 - DNA, 81 bp, Homo sapiens
ccacagcgaggcttcttgatcacgttcattgtggtctggtctaacttcccggtgacttggaggccaaagaacgcttgtagc

SEQ ID NO: 1830 - DNA, 96 bp, Homo sapiens
agtatttctccacggagtgtggtgatagcatcaaatgtcaaactggggtcacagggtttgggtgtgcttggtccagtaggttggatagggttgctt

SEQ ID NO: 1831 - DNA, 96 bp, Homo sapiens
ctttagtagctttcccaaaactcaaacggcaagttttgttgtatgaacctcaagtcaactcacccaaagactttacagaaggtaccctcttctcag

SEQ ID NO: 1832 - DNA, 54 bp, Homo sapiens
ttggatcttggaaattccgtattgttgaatgagggccagacaaagtggtacttt

SEQ ID NO: 1833 - DNA, 26 bp, Homo sapiens
caatacaagccgggctacgtccgagg

SEQ ID NO: 1834 - DNA, 29 bp, Homo sapiens
ctgttttactgacgttgatagctgtggtt

SEQ ID NO: 1835 - DNA, 111 bp, Homo sapiens
tggagggcatcgtcaccatcgtgggcctgaagcccgaaacaacgtacgccgtaaggctggcggcgctcaatggcaaagggctgggtgagatcagcgcggcctccgagttca

SEQ ID NO: 1836 - DNA, 33 bp, Homo sapiens
gggacgggtcggggagagtcagctggtggtggc

SEQ ID NO: 1837 - DNA, 33 bp, Homo sapiens
gaggagaagttgagacaggcggtcaagcaggtg

SEQ ID NO: 1838 - DNA, 115 bp, Homo sapiens
aaccacctgatagtcgtggctggcttgctggccatagcagtgcagttgacttcaatctcctcaccttccaccgcagtgtctttctggatatcgatcatcagattacgtggtggga

SEQ ID NO: 1839 - DNA, 28 bp, Homo sapiens
tctctgtggctgatctggcgtccacacc

SEQ ID NO: 1840 - DNA, 71 bp, Homo sapiens
tctccagcaaatggggttgaaggagtccgagtggatcaggatgatgatcaagatagctcttccctgaagct

SEQ ID NO: 1841 - DNA, 225 bp, Homo sapiens
tcgggccctctgggctcgcactggcccacgtccgtccctggcgcctgcccccaagtctgggtggtgctggtggcttctcaggagagggagcttgggggcatcaggacgccagggcctgcagggccctgggccagcccccgggtccgggctgtggagagcggtcaggggagatccgcagagcacgggagcaggggagaggctgggatccggagcccgctacatcgg

SEQ ID NO: 1842 - DNA, 86 bp, Homo sapiens
ccagcaaccactgggaatagaagacaaggatgacagccagtccagccaagatgagctgcagagcaagcagtccaaaggcctggagg

SEQ ID NO: 1843 - DNA, 84 bp, Homo sapiens
gttcttgtattcaatgtcgaagcccgtgatgatgctgttcccgtcgaatcgctgggtccagcgcaggttcatgctccgggcctt

SEQ ID NO: 1844 - DNA, 84 bp, Homo sapiens
tagtcccctcaccatggaccagatccggccaaacacagaactaaaagaaaaaatccaacggtggcttgcagagaggaaacaaca

SEQ ID NO: 1845 - DNA, 1349 bp, Homo sapiens
ctcaccgtggctaagagtgtcctaggagtatcctcatttggggtagctagaggaaccaacccccatttctagaacatccctgccagctcttctgccggccctggggctaggctggagcccagggagcggaaagcagctcaaaggcacagtgaaggctgtccttacccatctgcacccccctgggctgagagaacctcacgcacctcccatcctaatcatccaatgctcaagaaacaacttctacttctgcccttgccaacggagagcgcctgcccctcccagaacacactccatcagcttaggggctgctgacctccacagcttcccctctctcctcctgcccacctgtcaaacaaagccagaagctgagcaccaggggatgagtggaggttaaggctgaggaaaggccagctggcagcagagtgtggccttcggacaactcagtccctaaaaacacagacattctgccaggcccccaagcctgcagtcatcttgaccaagcaggaagctcagactggttgagttcaggtagctgcccctggctctgaccgaaacagcgctgggtccaccccatgtcaccggatcctgggtggtctgcaggcagggctgactctaggtgcccttggaggccagccagtgacctgaggaagcgtgaaggccgagaagcaagaaagaaacccgacagagggaagaaaagagctttcttcccgaaccccaaggagggagatggatcaatcaaacccggcggtcccctccgccaggcgagatggggtggggtggagaactcctagggtggctgggtccaggggatgggaggttgtgggcattgatggggaaggaggctggcttgtcccctcctcactcccttcccataagctatagacccgaggaaactcagagtcggaacggagaaaggtggactggaaggggcccgtgggagtcatctcaaccatcccctccgtggcatcaccttaggcagggaagtgtaagaaacacactgaggcagggaagtccccaggccccaggaagccgtgccctgcccccgtgaggatgtcactcagatggaaccgcaggaagctgctccgtgcttgtttgctcacctggggtgtgggaggcccgtccggcagttctgggtgctccctaccacctccccagcctttgatcaggtggggagtcagggacccctgcccttgtcccactcaagccaagcagccaagctccttgggaggccccactggggaaataacagctgtggctcacgtgagagtgtcttcacggcaggacaacgaggaagccctaagacgtcccttttttctctgagtatctcctcgcaagctgggtaatcgatg

SEQ ID NO: 1846 - DNA, 669 bp, Homo sapiens
gtcctggtagaagacaccctgtctagaatggcccttggtcctggaggtggggcgcaaaaggcctcagccagggaactgccctgccacctcccgaggcaggaaaggaagtgagaaaaggagaagtttttttactcctggggccaaagtagggggacaaacacccagtcgtatatggcttcagctctgaccaaaggcggatagggagctctcctgggtaggagcagggagccaagggggaggcagtggctgtgcctgggtgggcacagacagatctggtacatggccctgagccctgggcagagggacaaccttgccggtgagtgggcaggcagagaggaggcggcaggatgctgtttccccgattccatcctcagggagtggagactggaggggaggtgcactgactcagatgaactgttctcccccttctttgataagaagtaggtggcagcagcctctggaaaagtcagggccctggaggttacctggcccagggctactacagccacaggccccagtggcaccatgccaccccttccatggctccactcaagggggccacacagccaccgcctcttcctcctttccttcatcccaaactgggacaaaagacttcaagttctggctaagatgtagcagcagcggatgcccgggcatccaaagtggaaa

SEQ ID NO: 1847 - DNA, 67 bp, Homo sapiens
acacagtggggctacggcccctgtgcgtgcccagggcccagccaggtactcggtactggagcacgga

SEQ ID NO: 1848 - DNA, 69 bp, Homo sapiens
tccagattatgagcccaacctctggatgtgggtaaatcccaacattgtgtatccccctggaaagctgga

SEQ ID NO: 1849 - DNA, 46 bp, Homo sapiens
tccaggttgcggagtccaacatcagcaggttcattgtggatgagca

SEQ ID NO: 1850 - DNA, 130 bp, Homo sapiens
accacagttcctgcttgccgctctcacagttcccagatctgctgagttgggttttttctgctccctcctccacccagcctcccaggctccctttatagccgccttctggacaatcattaagcctggggag

SEQ ID NO: 1851 - DNA, 39 bp, Homo sapiens
ctgcagagaaagttcccgcatctggagttcaggagtatt

SEQ ID NO: 1852 - DNA, 300 bp, Homo sapiens
ccacggtggcgctggtcttcttgggcagcagcacggcctggatgttgggcaggacgcctccctgggcgatcgtcacgccgcccagcagcttgttgagctcctcgtcgttgcggatggccagctgcaggtggcgggggatgattcgcgtcttcttgttgtcgcgggccgcattgcccgccagctccaggatctcagcggtgaggtactccagcactgccgccaggtacactggcgcgccggcgccaacgcgctcggcgtagtggcccttccgcagcagccggtgtacacggcccactggga

SEQ ID NO: 1853 - DNA, 360 bp, Homo sapiens
cggcaggcacctagctatgtgaccactggccctaaaccttttccctctgtggcctcctggcttgcactgctccctctagaaagattccttcaggtctggaggcagaggaatgggcatagctgagccagttgccctcctagggcatgtttgaccaggactgagtctggaatctccaagttaaagatggtgaatcaatgcttcgggcttggagatggaacatgcctcctctccattcagctagaaggaccaaagcatgtggcatttggatggccagagtgccctgaagcaccactaccaaccttgcctccccctcctctcaaagagcctctgactgtgtcaccaaggggctcacatcttatg

SEQ ID NO: 1854 - DNA, 70 bp, Homo sapiens
tgcctgactctctcccacctccgccgggggcccagaagggacctccccgggaaatcggcgccacccagcg

SEQ ID NO: 1855 - DNA, 163 bp, Homo sapiens
gccctacgagtggtacagcccacacccatgtgcccagggccggtgcaacctcctggtgaaccagtactccctgggcaacagcctctggtttccggtcggggggttcatgcagcaaggctccaccatcgcccctcgcgccttatccacccgctgtgtcagtggc

SEQ ID NO: 1856 - DNA, 101 bp, Homo sapiens
ccaacttgggcgatgtgaccgatttgagttcgaatgccaccaaccgaagacgtgtattcccaactggaagcgctgtgacggccaccaagattgccaggatg

SEQ ID NO: 1857 - DNA, 26 bp, Homo sapiens
tggctcagtacggccaccccagtccg

SEQ ID NO: 1858 - DNA, 24 bp, Homo sapiens
atctatgtagtcacagtgctgggg

SEQ ID NO: 1859 - DNA, 26 bp, Homo sapiens
cgggtagtatggactgtggcccacag

SEQ ID NO: 1860 - DNA, 31 bp, Homo sapiens
tggattttctcatccagccatccacaacctg

SEQ ID NO: 1861 - DNA, 92 bp, Homo sapiens
gtgtctactgtgcctacaggctcagccactctccctcccccagctcgcattctccaaatgcccctcacatgcacccattcttctaacctgaa

SEQ ID NO: 1862 - DNA, 25 bp, Homo sapiens
gtctctgagcctgtccgtacacagg

SEQ ID NO: 1863 - DNA, 40 bp, Homo sapiens
ggcctggtcaatggcccatacgcgctcatcaccactgctg

SEQ ID NO: 1864 - DNA, 92 bp, Homo sapiens
caggtcacaattgttgtgaactttgatctccctgtaaaacaaggagaggagccggactatgagacctacctccaccgcatagggcggacggg

SEQ ID NO: 1865 - DNA, 142 bp, Homo sapiens
accgtagggcttattgatgaccacaaggttcttgtcctggtggagaattcctcgggtcagtgccttagcaagcacgttggggtggactcgctgcagctgccgtgtgaaccgcactatttcttgcactctccgctgaacagcg

SEQ ID NO: 1866 - DNA, 39 bp, Homo sapiens
tggtgggagtactgtaatccaacacttctttgttagcac

SEQ ID NO: 1867 - DNA, 114 bp, Homo sapiens
agacgtcaaccgtgcggctgaggttggtgctgcccagggcgttggtcacctcacaggagacgggctctgagaagtacgtgtagtccactgtggtcctgtacacctctccagatg

SEQ ID NO: 1868 - DNA, 25 bp, Homo sapiens
actatcgtagctctctatgctttca

SEQ ID NO: 1869 - DNA, 57 bp, Homo sapiens
gcagcaggtttgcacagggtgccagttagggaggagaaggcagcgaggaaccccgca

SEQ ID NO: 1870 - DNA, 122 bp, Homo sapiens
tctcgcacgatccggccaagagatggcggggtggcgggaggggcgctctggcgaccccggaagcgagaagcaggcctctgcagggccagggatgaaggtgcaagggaaagccctgggacctg

SEQ ID NO: 1871 - DNA, 32 bp, Homo sapiens
ccgtgctgggacgcaccacatagtcagttctt

SEQ ID NO: 1872 - DNA, 175 bp, Homo sapiens
ttgatagcaggaattgccagcggagagggggcctgtgagagaggtgcgaccccttcagtactgcttagcggctcggccaggtcctctgcctctgatttgatcgtttttattttcttcttcttcttttcctctttttccttaaccttttttttaaggacagccaagtcatataagg

SEQ ID NO: 1873 - DNA, 142 bp, Homo sapiens
acaggcggcacttgaacgtgaagctgtcgtagtctgtggacgtgatgcggggcttgaacgtcttggagcggctgatgcggtcggctttcttggcctccctctcaggattatgcatcctctgcatgtgttcccgtagtttgtc

SEQ ID NO: 1874 - DNA, 26 bp, Homo sapiens
cgcgcgctagagcgacccggcgaggg

SEQ ID NO: 1875 - DNA, 85 bp, Homo sapiens
cacctggcccgagtggaagctatgctgaatgaccgccgtcggatggctctggagaactacctggctgccttgcagtctgacccgc

SEQ ID NO: 1876 - DNA, 63 bp, Homo sapiens
gctgtacagcggagtcccattcctgggcccctaccacaaggagtcggctgtgacggccttcag

SEQ ID NO: 1877 - DNA, 104 bp, Homo sapiens
atgcccggggcagttcacgtgccgcacggggcggtgtatccggaaggagctgcgctgtgatggctgggccgactgcaccgaccacagcgatgagctcaactgca

SEQ ID NO: 1878 - DNA, 90 bp, Homo sapiens
ctgccggcgtttcggggcgcgcctcggctgcctgcccggcggtctccgggtcctcgtccagaccggccaccggagcttgacctcctgcat

SEQ ID NO: 1879 - DNA, 240 bp, Homo sapiens
gtcgacccaggttaggaagcccgaggtcggggcgttaccccaagggccctcccgcttcccctccgagggcagagaggcgtccgcgcccggacgcactgcgggaacacctggagcgccggcggagctcggctgtccccgcgggagggagcccgacgcgcatccttgggacccggacccggcgcccgcgcctcgggacggatttctgcctcggctgcaggcgcagcgcgcagacctgagcct

SEQ ID NO: 1880 - DNA, 101 bp, Homo sapiens
acagacgcgtgaggtttgggtacaggtaaaactgaattccttgggctgccccaggcaacgtcacccctcgaattaacaggaccaccagcatgaggtaagga

SEQ ID NO: 1881 - DNA, 89 bp, Homo sapiens
accagggtggtgtagtagtgagaggatggtccctgctccagcaccgccttcagccgcatggcgttggacatgaacagggccacgtccag

SEQ ID NO: 1882 - DNA, 774 bp, Homo sapiens
agatagagcttccctcccagtggaccctgcttagcaagttggaatgttcccacaagttccaaccctaaggatttcactccagggacagagtcaagtagattcttttgtaaatcattggccagaaaagagcacaaccactgctctttttcactattttacagctatttttgccgtcccctgaatgtacatcaatttccatgcagcaattggatgtctcagcctattggcttttcatagatgcaaactttcctttagggctttgtaaagaagttttgggaagttcttcaatagcagcagtttggggacatcacgtgtagccctgtcgatatttcctgaatggatttcattcctttctcagtcttgaccattcccttacccaacccccaccccaacacagtcaaaaccttttcgagcagcagctaggaaggtgagtggcctcccaccatgagcctcactttggggaatctatgctttagttggggcatattcttgccttagcctcatctctgcatttggcctcattctgctgctgcttctcagtacccagaagtccttgggttctaccagagaccactccgacagaaagggtcagaaacaactgaccctttcttggctgggtctggactctggagtacaggaagaactaaattattttgtcttggtccaagctgagctcacgctggcttcccgaagaggagacaggaaggttaggtcagaagtatgctcatgttgagacctagggcagatggtaccgggcaccatgaagcatcttga

SEQ ID NO: 1883 - DNA, 41 bp, Homo sapiens
cagcaggagtaggggcggcgaggctgaggtgtccgaggcgc

SEQ ID NO: 1884 - DNA, 84 bp, Homo sapiens
gaggctacgatttgaggaggttgagggggaagacaggagggaaagaaaagtcctacaactgtcaggaatggggcacctttccct

SEQ ID NO: 1885 - DNA, 27 bp, Homo sapiens
ggatgcgggggccccacatcattcagc

SEQ ID NO: 1886 - DNA, 51 bp, Homo sapiens
tgccacaccctctaacaggggcccaaggaaccaatttatcacccatgactg

SEQ ID NO: 1887 - DNA, 92 bp, Homo sapiens
agcaaacctgaggcctcccggcagacccacccaccccctggggctgctcagcctcaggcacggacagggcacatgataccaactgctgccca

SEQ ID NO: 1888 - DNA, 120 bp, Homo sapiens
gacacagacccaatccctgagcttcctgctggggtcctcagcctccttggactgtggcttctccatggcaccgggcttggacctcatcagtgtggagtggcgactgcagcacaagggcag

SEQ ID NO: 1889 - DNA, 34 bp, Homo sapiens
caggtgccggttcatgtcgttcttggccgtggcc

SEQ ID NO: 1890 - DNA, 235 bp, Homo sapiens
cgaccagatggtgccgggcatgaagcgggccgacgaggaataggtggtggaggtggaggtggaggacgacgagaggctggccgcggagggcgcgagggggccggccggggagcgcgcgggcgagcccagcacgcgcgccgaagggctgcagacagcggccggccgggcgcccagctgcagccccaggggccggatggggctgacgaagccggtctgcactgcctggtcgcgacga

SEQ ID NO: 1891 - DNA, 109 bp, Homo sapiens
cctccaggggcacaacacatgtccaggatccgctcatgttcctggggtgccaaggccatgacgggcaacatgctggaggctccctgcagcatgtagtgcccagccaggt

SEQ ID NO: 1892 - DNA, 371 bp, Homo sapiens
gctctgcttcctagcgggcacacacatactcatggcagctgtgcccctcaccacctttgccgtggtgcagctgcgtcgtcaggcttcctccgactatgactggaacgagagtatctgcaaggtcttcgtgtccacctactacaccctggcgctggccacctgcttcacggtcgcctccctctcctaccatcgcatgtggatggtgcgctggcccgtcaactaccgcctcagcaacgccaagaagcaggcactgcatgccgtcatgggcatctggatggtcagcttcatcctctccacactgccctccattggctggcacaacaacggcgagcgctactatgcccgcggctgccagttcatagtctccaaga

SEQ ID NO: 1893 - DNA, 37 bp, Homo sapiens
tgatctttccctccgtcaaagtagtcaacagccaaac

SEQ ID NO: 1894 - DNA, 29 bp, Homo sapiens
ccgccatgttttcaagcccgaggccagct

SEQ ID NO: 1895 - DNA, 34 bp, Homo sapiens
gtgctgcagggggcgatatactcagcaaccacag

SEQ ID NO: 1896 - DNA, 30 bp, Homo sapiens
gaatcaaagccatcacacgccaccaggagg

SEQ ID NO: 1897 - DNA, 275 bp, Homo sapiens
aatactatcatgaagggaagaaccatatttgttctgctcttcaaccagagaaatatgtagttggaaaaatttgctatcttcaggaaatagaagatgctgaggctggtggcaaaccacatacttgattgattaccaattacccaaaagtaactaatatattcaattaggttaccggaggcatatatatttggagagaatatctgtataaatccatctgtaattattatccatatcagaaaaattcttgaaatagctaagccggtgagaataaagcc

SEQ ID NO: 1898 - DNA, 45 bp, Homo sapiens
agagtcggcacagggtggactgaggggcgtctcgcttttctgtcc

SEQ ID NO: 1899 - DNA, 37 bp, Homo sapiens
ccagtacaccagcagaggaaacttataacctcgggag

SEQ ID NO: 1900 - DNA, 25 bp, Homo sapiens
aggaacctaaagaagctctccctct

SEQ ID NO: 1901 - DNA, 28 bp, Homo sapiens
tacgggatgttagtggaaggctgtgagg

SEQ ID NO: 1902 - DNA, 24 bp, Homo sapiens
cctgttccttcaccacccaagaca

SEQ ID NO: 1903 - DNA, 45 bp, Homo sapiens
tagtggaagtacctcaaagcagcaatacgagtctggcctcttttt

SEQ ID NO: 1904 - DNA, 25 bp, Homo sapiens
aggtgtctgaagaaataagctccca

SEQ ID NO: 1905 - DNA, 130 bp, Homo sapiens
tggccaattacatccacgtccctcccggctccccggaggtgcccaagctgaacgtcaccgttcaggatcaggaggagcatcgctgccgggagggggccctgagcctcctgcaacacctgcggcctcactg

SEQ ID NO: 1906 - DNA, 103 bp, Homo sapiens
ttcctgccgcctgttgcgcatgattgccttgtattcaccaatgcgcagctttttgccatccaccaggcaggtgcgctttggcctgggcttgtacttatagtca

SEQ ID NO: 1907 - DNA, 337 bp, Homo sapiens
atggttaaacaattgcacgtgctcttcttttgtgagttctgtacccaaaataactttgtttacaaaaagagaaatctaaggcaaatagcaattttatccattgaataatactaaccatctgcttgttttctgcagggatttggaaggcaggagtggtaggacttgtgatttcatcaagcatctataattcaccaattctacagcaatacaaattttggatcctttttccatatagaaatgtgatgtcttcaccctctcatggaatagcagggaggttgcagagcaggcctcagggatttgagttctcttttgcttttctagtagctggttgagggtg

SEQ ID NO: 1908 - DNA, 440 bp, Homo sapiens
catccctccggagttgagcaaacaacgccacgccgcgtgcgctccggcagagcccagcactgacccccaaaggccgatttaaagaccctcggccgccagctcggaagcggatggcaacttagtttccgagcgaatggcgtttattgtccaccctagtccgagggctgcagtcaactaaaccacgaggtttcacaacggcgcccgaccctgcccgcgcctcgcgcccacgcggacgcaccgaccccggccgctgcgcggtggccaacgagtcgctttcctctcgggcctttcggccgccgggctcctttccgcgagagaacactgcggcggagaaaagtcattgtcaccttcaacgtggatccctcaactccggcgactcctcaattatgcccaggctccactcacttccccgccccgagactttcggtttgcctcaaata

SEQ ID NO: 1909 - DNA, 47 bp, Homo sapiens
cctccacccgcgtggccgggatggcagcgctcagctggttcaagtcc

SEQ ID NO: 1910 - DNA, 103 bp, Homo sapiens
accgccgcccgttccttcttccagggacacggcgagctggctgaaagcgtaaaggagcgagcagaagccgcaggccacacacagcaccacgacgcgcaggtag

SEQ ID NO: 1911 - DNA, 24 bp, Homo sapiens
aaatttgattcctaaaaggactca

SEQ ID NO: 1912 - DNA, 42 bp, Homo sapiens
agggttgtggcttcggcagtggtgcagcatccgcgcggctct

SEQ ID NO: 1913 - DNA, 94 bp, Homo sapiens
gggccacagcttcggccaactcctcctccatctcatgagttctcacgggctcgggctcgggcccggggaaccggtagaattgggcatctcggtc

SEQ ID NO: 1914 - DNA, 84 bp, Homo sapiens
ctgagtctgaaccgcccaacgcggcctcaacgtcgcggagccgtcgccatctttcccgtttcctggtcgcggagatgaacaccc

SEQ ID NO: 1915 - DNA, 29 bp, Homo sapiens
tggacaagcaggagttgtgagtccccaga

SEQ ID NO: 1916 - DNA, 64 bp, Homo sapiens
gaagagccctcatgtggcaaagacatggcctgggcagggcctggtgcagacagtagggaatgct

SEQ ID NO: 1917 - DNA, 45 bp, Homo sapiens
ctgcaccttgttgatgcggtgagctgcccggttatctttggcctt

SEQ ID NO: 1918 - DNA, 25 bp, Homo sapiens
ccagtggctgcgtggtgtctcccct

SEQ ID NO: 1919 - DNA, 24 bp, Homo sapiens
aggaagagctttgccatcccctgc

SEQ ID NO: 1920 - DNA, 27 bp, Homo sapiens
cggctccgggtgcggacaccgccagct

SEQ ID NO: 1921 - DNA, 30 bp, Homo sapiens
tccacaccaaaggccgaaagcatggcagga

SEQ ID NO: 1922 - DNA, 74 bp, Homo sapiens
cctccagttgtcggggtgggcacatgagagggtccgaggagctgccggctgccctagtattggggaaggtccag

SEQ ID NO: 1923 - DNA, 115 bp, Homo sapiens
tccctcatgcttgagtcccctggggccaccttgaggcagcctatcccaatgcatccccgccccgctatccgggtggggcgcagaagagaggggagcccttctccgctcagtctcc

SEQ ID NO: 1924 - DNA, 26 bp, Homo sapiens
gagcaaccgcacccagcttaaggttt

SEQ ID NO: 1925 - DNA, 133 bp, Homo sapiens
acacaaagcccagataagccacgctgaccacagcagccaccacatataatgccacatgccctaggtcccggacataaaccactacaaagtacatattgatggaacagatgataaggaccaagattcctcctgc

SEQ ID NO: 1926 - DNA, 73 bp, Homo sapiens
tgtgtggggctcggcagtcacccctggacattttgtcacccggaggctgcaacttggtcgctctggcctggct

SEQ ID NO: 1927 - DNA, 27 bp, Homo sapiens
ggtaccatggagacttgaagctggtct

SEQ ID NO: 1928 - DNA, 67 bp, Homo sapiens
cagccgaagcccagtccttcaggacaccaaagtctggcccttcctctctggcgataccaggagctca

SEQ ID NO: 1929 - DNA, 108 bp, Homo sapiens
ggaacgcgggcgctcctccagcttccgagtccagccagcctgggcgcggggcgccgcccccgagacacccgaggagtccgttcctccctggttacgtggactgtggag

SEQ ID NO: 1930 - DNA, 46 bp, Homo sapiens
gctggacgccgacccctccctccagcgggtgcgccaggaggagagc

SEQ ID NO: 1931 - DNA, 100 bp, Homo sapiens
gtcccacagactctgacatcatgtagccggccccattcatcctcgtaactgtccaccatcatgacgctgtcgtcctcacggcccagctcagcgttgaggt

SEQ ID NO: 1932 - DNA, 45 bp, Homo sapiens
cagcaagcaggccgagaatggcgagcgggcaggtagccctgatgt

SEQ ID NO: 1933 - DNA, 68 bp, Homo sapiens
atgcccaaccccaagccggtcggaggacccggcgggaagcatgcacctgcccctactgtaaagacagt

SEQ ID NO: 1934 - DNA, 24 bp, Homo sapiens
ggctgccttggcccatcctcaaga

SEQ ID NO: 1935 - DNA, 25 bp, Homo sapiens
ataaaaatagcctaggtctgaatac

SEQ ID NO: 1936 - DNA, 49 bp, Homo sapiens
gtgatcctagagagtgatccccagcaggtggtacaccgggtggcattaa

SEQ ID NO: 1937 - DNA, 325 bp, Homo sapiens
gatcttcctgtgagaattgccccaaatcagagtcttgctggaggaactgcttctcttctttcactttgtccatcacttccaacacaacttggtccaaactgttccttttgggggtgttgtggggtggtggtggccggtctcgggggcatgtgtacagacacatcttggagatggctttccgaaggcggtctctgggtgactggggttcaggctctcgggacagaatcctgatggatggcacatcagttggatggttgcaattccagaacatgtgggatggtgtgaacttttggacaggtgtcttagacacataggagtagagaca

SEQ ID NO: 1938 - DNA, 36 bp, Homo sapiens
gctcaatgaagacacgggctcgtgcagagactggat

SEQ ID NO: 1939 - DNA, 137 bp, Homo sapiens
tcgaggcgagtagacagcagcatccaggtttccggggagcccctcccaaagggcagacactcggaacaaggggcccggtcctgaatctgatacagtccacacatagtcccccttgaaagcataggtcttcccacggg

SEQ ID NO: 1940 - DNA, 48 bp, Homo sapiens
taagcgggactccagcgtgctgcggtgcgagccccaatcagacaccga

SEQ ID NO: 1941 - DNA, 101 bp, Homo sapiens
gagggctcgagtcttcttttctgccatctctcgctggcgcaacacctccagttctgcaaaatctgcactccgctcctgagctaagcgtccctgccctactc

SEQ ID NO: 1942 - DNA, 100 bp, Homo sapiens
ccaccgtagttgagccagcgatagtactgagagtagggaaagagcctccggtaataaagtttaagcagctcgggcagctcggtggggtcaaacgtctcca

SEQ ID NO: 1943 - DNA, 49 bp, Homo sapiens
gcggaactcgccacggtaaggattaccacaggaattggcgggaacagca

SEQ ID NO: 1944 - DNA, 120 bp, Homo sapiens
ggacggacgatgggcccaaaaagacaatcagcgtggccaggctggagaaagctgctcagacccgcaagactttaatcgagggcaaaatgacacaccccagggctattgtggtggatccac

SEQ ID NO: 1945 - DNA, 88 bp, Homo sapiens
gccatggcagtcgccactccctggccagcacggacgagaagcgagaactcctgggccggggccctgaggacgagataggggacccctt

SEQ ID NO: 1946 - DNA, 78 bp, Homo sapiens
gcagcaccacctcgacttctgcccccattgcccacttgctatgggcctctcaaagtgggaggcacaaaccccagctgt

SEQ ID NO: 1947 - DNA, 104 bp, Homo sapiens
gctcactgacccaaagatttgcaccgtgtgggtctgacctcatcatgtggagtgcagagggccctgatgacatgtgtgtgatgaggaccatgacccttgaaccc

SEQ ID NO: 1948 - DNA, 64 bp, Homo sapiens
ccacatgtccacaggtgttgcatatgtggactgcagaagaacttcgggagctcggtaccagagt

SEQ ID NO: 1949 - DNA, 50 bp, Homo sapiens
aaggcctgattgggctgttgcaggaaggaaacacaactgtattagtagag

SEQ ID NO: 1950 - DNA, 82 bp, Homo sapiens
ggtggaacacgcaagactcacggaataggcgggcccggaacaccccacaccggtccagcaggtctgtcacagggtcggcata

SEQ ID NO: 1951 - DNA, 119 bp, Homo sapiens
gcccttcttccctgcggagggagggcctgggcggtcgcgttggcgggagggaggttacctttcccagtctcgctctggccgcctgagccaggaggaagcagcggcgaggtctgcgggag

SEQ ID NO: 1952 - DNA, 34 bp, Homo sapiens
gggcgactcggctaatggcgtcggcgagtcttag

SEQ ID NO: 1953 - DNA, 248 bp, Homo sapiens
catgatggcatccaaaaggccaacgagctcttcagcattgatgaacttctgtgtgctgagggtgtacatcttctcatagaagtctgccatctccatccgagcctgaacaaagaagcagagctgctctgacaggtgggaaaggagttcttccacgtgaggagcagtcccacccagggcaccacggccagtcaccaccttcttcagctcattatgcaatgaagtatagatggtgcggatggaatccttcc

SEQ ID NO: 1954 - DNA, 99 bp, Homo sapiens
agctgaagggcgagaggccgaccagccgaaggaataaaaagccgtgccttgaaggccggtggctggagtcagacgttttctccctaggcgcgatcacgt

SEQ ID NO: 1955 - DNA, 26 bp, Homo sapiens
tgagccttccagtcttcagtagaaac

SEQ ID NO: 1956 - DNA, 162 bp, Homo sapiens
cgtatgtggtgttgtctatccgaaaggtagggcacaacgcggcccccagggtgtcactgctatagatgaggctaaagttacagggtgagcccaaaattctccactggatagacacagaatggctggaggccttggactccgccagggtgaagttacatctct

SEQ ID NO: 1957 - DNA, 51 bp, Homo sapiens
cctttttcgatcattcaatgcatagtgcattgccccttgggatatatttgg

SEQ ID NO: 1958 - DNA, 24 bp, Homo sapiens
gatgacaaaatatctggaggagta

SEQ ID NO: 1959 - DNA, 80 bp, Homo sapiens
atagcctctttccgagattccctgagctcctgtcttaattcttcatttcttccggtaagctgatcaacttgggctttcaa

SEQ ID NO: 1960 - DNA, 47 bp, Homo sapiens
tcccatgagcatgagagaagaagcaatgcacgctccggcagattcct

SEQ ID NO: 1961 - DNA, 319 bp, Homo sapiens
gcctgcacttcgtggacgcctttctctggaacggcagcatctacttcccctactacccctacaactacacgagcggcgctgccaccggctggcccagcatggcgcgcatcgcgcagagcaccgaggtgctgttccagggccaggcatccctcgactgcggccacggccaccccgacggccgccgcctgctcctctcctccagcctagtggaggccctggacgtctgggcgggagtgttcagcgcggccgctggagagggccaggagcggcgctcccccaccaccacggcgctctgcctcttcagaatgagtgagatcca

SEQ ID NO: 1962 - DNA, 67 bp, Homo sapiens
gtgtgctgcctccgaaaagtttgcctcgtctccacaagtctgtctccttttttgtcaacctcaagta

SEQ ID NO: 1963 - DNA, 125 bp, Homo sapiens
tctggcgcacatcactatatttggctgcctctgccagtgctgaattctttgctgacattgccctggctcctatggaagctgctaaggttcgaattcaaacccagccaggttatgccaacactttg

SEQ ID NO: 1964 - DNA, 116 bp, Homo sapiens
ctatgactggggaactagtacacacctatgatgagcactcagagcaagtcaattgctgccatttcaccaacagtagtcatcatcttctcttagccactgggtcaagtgactgcttc

SEQ ID NO: 1965 - DNA, 24 bp, Homo sapiens
gccaaaggttctaccaaaactgcc

SEQ ID NO: 1966 - DNA, 28 bp, Homo sapiens
tttacaggacacccaggtgcctacttga

SEQ ID NO: 1967 - DNA, 73 bp, Homo sapiens
cggtggaccccgagttcacccacaaacccctcccagatggggcccgcccaacccggtaatcacgtctcaactt

SEQ ID NO: 1968 - DNA, 26 bp, Homo sapiens
ctgcagggtccctatcccggggcgcc

SEQ ID NO: 1969 - DNA, 25 bp, Homo sapiens
caataagaaagcacctttaaattga

SEQ ID NO: 1970 - DNA, 123 bp, Homo sapiens
ctcggccagaaaacctctcggtggcccgcttgactttgccgtaggtgcctttgcccagggtctcctgcagctcgtagcggtgcttcaagttgtgcttgtggtgatgccgcttcaccccgtgcg

SEQ ID NO: 1971 - DNA, 58 bp, Homo sapiens
atattgaatatacccgaggcagccagaggatcatccgcaatgccttacctatcggcag

SEQ ID NO: 1972 - DNA, 31 bp, Homo sapiens
tgtttgtggcttgatcgtcccccaggaagac

SEQ ID NO: 1973 - DNA, 114 bp, Homo sapiens
cacagggtcgtggcgaggattcaatgagataacgtttgcaaggcaatgggcaggcagtaagcactcaaatccgacaggagctactgtcacgaaaagcgggtttgcagccttggc

SEQ ID NO: 1974 - DNA, 25 bp, Homo sapiens
gatggaagccttccggcagaaggca

SEQ ID NO: 1975 - DNA, 24 bp, Homo sapiens
gctgctccggagccgtttcgacat

SEQ ID NO: 1976 - DNA, 47 bp, Homo sapiens
cccgcacacggctcgcggtctcggcgccgcggagatgcccggccagg

SEQ ID NO: 1977 - DNA, 130 bp, Homo sapiens
cctgtggcgtccagtgaggatgatcagaatggtcccgggggtaatgctggctcgcagttttctcacgtgctgactgaagggttttttgccgtggctcaacagctttcgaggcacatcttcagtaggataa

SEQ ID NO: 1978 - DNA, 125 bp, Homo sapiens
catcctggcctcgcagcgccgcaaggcgccccccgcgcccccgctgccgccgccgccgccacctggagggcctccaggcgcgcttgccgtgcgccccagcgccaccttcacaggcgccgcgctct

SEQ ID NO: 1979 - DNA, 145 bp, Homo sapiens
tgaccgggatactgctgtgcgcggccgggctgcccgtgtgcctgacgcgggcccccaagcccatcctgcacccgccgcccgtgagcaagagcgacgtgaagcccgtgcctggcgtgcccggggtgtgccgcaagaccaagaagaa

SEQ ID NO: 1980 - DNA, 93 bp, Homo sapiens
cgatgtccctacagtggaggcggctggagaagaagcctgggcgaagcagttgaaagctgcttgttcactggaggactcatcagaggtcccatt

SEQ ID NO: 1981 - DNA, 43 bp, Homo sapiens
tgaggaagtagacgagcgacagcccgaagaccagggcgagcac

SEQ ID NO: 1982 - DNA, 80 bp, Homo sapiens
cacagcctcatcacggccaacgtgccttaccagacggtaatgcgaaacgccgacctggacagcttcactactcacaggag

SEQ ID NO: 1983 - DNA, 32 bp, Homo sapiens
tcgtacgttcgcagggtgactccaaaaatatc

SEQ ID NO: 1984 - DNA, 42 bp, Homo sapiens
caatgaggacacgtagtggccggtctcgtcgaacaaagtcat

SEQ ID NO: 1985 - DNA, 148 bp, Homo sapiens
aaagcgcgattgcgagagctcggcaaccctgccgactcagccggaaccggctcccggcccgaggggcgtggtgtcctggtgctccgactccttccgcaggctccttgggacccgcggttccgggagtcccttgctcagggtccctttc

SEQ ID NO: 1986 - DNA, 149 bp, Homo sapiens
ctcctttctgcggctggatggcggggccagcaggctcatggcactgggctggtgctctggcgaccgcacgatggcggacatggcgatctgctgcctcgcggtggctggcgtggatgggtgtgggtggtccgttgctttgcggtgggcag

SEQ ID NO: 1987 - DNA, 187 bp, Homo sapiens
atacctccgaagcccatggctgctcccatgtggcagccaaggcctcctctgggcacgaagggctggctggtggcccctggggctccccaggctcttggagagctgtgctcccagcacagggtacagtgtggcagcggggagccccagagagctcacttgtgatggtcggcaggtgcctccaatctcg

SEQ ID NO: 1988 - DNA, 116 bp, Homo sapiens
gctacaggtgattgccgagccagagcacgagtatgaataggtgtgggtgtacgggttgtccagcagaaatttacagctgtccagcttcttggcctggtcatagcagttgtcatgtg

SEQ ID NO: 1989 - DNA, 29 bp, Homo sapiens
gcctgagagagcgggcctgccgtggccac

SEQ ID NO: 1990 - DNA, 104 bp, Homo sapiens
tcacggctgcggtgatcgagcacctggagcgtctagcgcttgtggacttcggcagccgcgaggcagtggcgcgactggagaaagctatcgccttcgccgaccgg

SEQ ID NO: 1991 - DNA, 89 bp, Homo sapiens
cacaccatggcacttgacccatagcaactgttgaaaaaccacaatggcacggttactaaataagcgaggcatagccttctccggcttag

SEQ ID NO: 1992 - DNA, 73 bp, Homo sapiens
ggtctggaaattccagggcctgactcttgatcttactgtgtaaacacatgatccgctcgtccatgaatgggca

SEQ ID NO: 1993 - DNA, 24 bp, Homo sapiens
aattatggtacatgaaaataatct

SEQ ID NO: 1994 - DNA, 72 bp, Homo sapiens
agctatttgggagtctgatgcataagaatagctttaacccaggaggcagaggtagcagggacccgagatcat

SEQ ID NO: 1995 - DNA, 103 bp, Homo sapiens
gagatcccgcatctgggcatcctttagtccctccacccactggacatccagggtccggagcagcggacaactggagctgcaaagggccgagaccgcgatccat

SEQ ID NO: 1996 - DNA, 108 bp, Homo sapiens
ctgtgcatgacgtgggctgccccatcgtccaggggtagcgagtcaggcggggggctgatggggggtggccggatcacatggcgctccatctggatacacttgggcggg

SEQ ID NO: 1997 - DNA, 24 bp, Homo sapiens
ctgaacagagactgcctcctctga

SEQ ID NO: 1998 - DNA, 24 bp, Homo sapiens
aagccatctccagtatccattctt

SEQ ID NO: 1999 - DNA, 127 bp, Homo sapiens
cctcatagacacctgcagggagtgcggggcccgggctctggagctcatggggcagctgcaggaccagcaggctctgcggcacatgcaggccagcctggtgcggacacccctgcagggcatccttcag

SEQ ID NO: 2000 - DNA, 28 bp, Homo sapiens
gcgccctgcgtccggcagaggaggcgag

SEQ ID NO: 2001 - DNA, 30 bp, Homo sapiens
gggcgtccccagctaacacccatccacgca

SEQ ID NO: 2002 - DNA, 126 bp, Homo sapiens
catcccggtacagcagcgggtacacagcactccgggagtgccctggctccgtcatgccctccggtggggacacaggttcaataccgtcctcaccaccacccaagaccgacgtcttgtttggctctg

SEQ ID NO: 2003 - DNA, 32 bp, Homo sapiens
agctcacagggctgacgggctccaccccttcg

SEQ ID NO: 2004 - DNA, 34 bp, Homo sapiens
ttctgtccagcgagaactctcattcagctccatg

SEQ ID NO: 2005 - DNA, 123 bp, Homo sapiens
attcccgggctggaactcagacagcagggagggcctccgccgctggggctggatgatggagccgggcgacaggtgggaggcatagtcgcgggagtggtgctggtactccaggagcccgacgtc

SEQ ID NO: 2006 - DNA, 87 bp, Homo sapiens
acccggccaggcatggcctccaccaagctcagcccttgggacaagagcagccactctgcccaccgcgtcgacctgtcagccgtgtga

SEQ ID NO: 2007 - DNA, 62 bp, Homo sapiens
ccgcggcccactcggcgcactcagccagcgtctcccctgtggagagtcggggctccagccag

SEQ ID NO: 2008 - DNA, 37 bp, Homo sapiens
catcaccctttcctcgatgccagcccctcggtcagga

SEQ ID NO: 2009 - DNA, 24 bp, Homo sapiens
agaacgacacattggatacagaag

SEQ ID NO: 2010 - DNA, 26 bp, Homo sapiens
gcacggacgcagaggcacccggggcc

SEQ ID NO: 2011 - DNA, 24 bp, Homo sapiens
accagctgtttattgaccacacac

SEQ ID NO: 2012 - DNA, 197 bp, Homo sapiens
gcacaatctgccacggaaggtccaggatgctgcgggcagttcttcgcaagaagctccccagccccgtggcaggaccatcccggatggccccgggcctgagcacaccctctgccgactccagacgctgcctcttcctgcgggcgaggcgctgccgggcctgcagctgccacttcttcttgtggaaccggagccagaca

SEQ ID NO: 2013 - DNA, 70 bp, Homo sapiens
gcaattgcaactccggctggagccccggacctgcaagcctgggtgtccgtgggtccgtctgcccagccat

SEQ ID NO: 2014 - DNA, 27 bp, Homo sapiens
ttagaatcccccactcggagtctaagc

SEQ ID NO: 2015 - DNA, 106 bp, Homo sapiens
attatggttactggtgatcatcccatcacagccaaagctattgccaagagtgtggggatcatttcagccaacagtgaaacagtggaagacattgcacatcgcctca

SEQ ID NO: 2016 - DNA, 25 bp, Homo sapiens
gaaactttgactgcctccaggttgg

SEQ ID NO: 2017 - DNA, 296 bp, Homo sapiens
actctgcggaccagcactttggaaaccgggatttttgttctgggcatctcactcctggagggttgctggtgcaccacgggatggctagatggaaggttggtcaggtgcttgatgctaatagggatcttagagtccttcagcaagctgcctggtgttcgcagtggacaggtgatggtgcctggagatacgggctttaaccgggacagggaggacgtctcctcgttgtccttccctccaggaagggttgctggacttccgtccgggtcagcatagagatcatagagcgcgtccccgct

SEQ ID NO: 2018 - DNA, 61 bp, Homo sapiens
tgtcccgggccacgtctgttggagaccagctggaggcacccgcccgcaccatttacctcaa

SEQ ID NO: 2019 - DNA, 34 bp, Homo sapiens
attcacatttgggaaacgaacaggagatgagcaa

SEQ ID NO: 2020 - DNA, 108 bp, Homo sapiens
aaggtagccaagggaaccacatggaagttgtgacagctcccagcggcgcgcccctttcgtgtgtgccggtacctcggcttaggagttgcccgctgacaccttgaatga

SEQ ID NO: 2021 - DNA, 102 bp, Homo sapiens
aagatctcaccgccagccatgatgctgctctcctagagatggaaaataaccacacagttgccatcacaatcctgcaggatgaccacgaccacaaagtccaag

SEQ ID NO: 2022 - DNA, 24 bp, Homo sapiens
aggcggcccactagaaggcggcag

SEQ ID NO: 2023 - DNA, 108 bp, Homo sapiens
cggagctaaaagaattacggcacaaagagcagaacccatatgtggttcaaagcattatcagcttaataatgggcatgaaattctttcgaattaagatgtatccagtgg

SEQ ID NO: 2024 - DNA, 126 bp, Homo sapiens
tcgtttaacgaccgcacagctccgaggtttggcctctatcgttatgctgcagatcagtttgagcccaaggcatccatgaaacattacaggaaaattattgacagcaatggtttcccgggcccagaa

SEQ ID NO: 2025 - DNA, 24 bp, Homo sapiens
ataagtgattacacctgctgccca

SEQ ID NO: 2026 - DNA, 113 bp, Homo sapiens
gtgccagcaaagtgtattctccatctggcctcagagcagatgccaagcctaattgggccacaagatccgtgaaggtggtttgctgttttccagccagctcaataacttgtttg

SEQ ID NO: 2027 - DNA, 24 bp, Homo sapiens
tcatgccatgctatttcttcgtct

SEQ ID NO: 2028 - DNA, 42 bp, Homo sapiens
taagatcacgctgacgtcggacccacggctgccgtacaaagt

SEQ ID NO: 2029 - DNA, 364 bp, Homo sapiens
gctctaggccgagaatggtatatacatacgatctatacagtgagatcgaaagacaatgccaatcgaggtattggcaaaagaagtgtggagtaccattctctggtgagtcaaggaaagccccaatccaccaccaagagccggaagaagagagagatcaggagcacaccctcactggcatgggagattggtgctgaaaacagtcgaggaacaaacatccagcacattgccctggaccgcaccaagaggcagatcccccatgggagagcacctccagatggcatcctcccctgggagctcaacagccccagctctgcagtcagcctggtcactgtggtgggaggcaccacggtagggttactcacca

SEQ ID NO: 2030 - DNA, 109 bp, Homo sapiens
gcgggtgctgcgacagcggcccgggcggcgggggctgcggtggcgctgggtgcaggcagcccgcctccgggccctggaagtccccgcacagccccccggtggcggccgc

SEQ ID NO: 2031 - DNA, 55 bp, Homo sapiens
ggggcaggaacactttgatggctgagtgcagggtcccctcggaggtcatcagatt

SEQ ID NO: 2032 - DNA, 140 bp, Homo sapiens
tgacggccagcgcacagccgcgcgggcggcggccaggagtcggagtcggagtcgtggtgaccagctgcaagcatccgcgttgcgtcctcctggggaagaggaaaggctcggttggagctggcagtttccaactccctgga

SEQ ID NO: 2033 - DNA, 26 bp, Homo sapiens
tcactttaaatgatctcaagccagcc

SEQ ID NO: 2034 - DNA, 81 bp, Homo sapiens
tgaatctttacttgtgcagactccagctgtgcctcctggcccatgcctccctcccagattacagggtagacccaaagcaaa

SEQ ID NO: 2035 - DNA, 86 bp, Homo sapiens
caggactgaaagggcacagacaggtcactgccagcattgttggggcaagcctgcaagcacgcatcactggggatctgacatgacaa

SEQ ID NO: 2036 - DNA, 154 bp, Homo sapiens
ctggacaagccgagctacgatgcctcgagagagaagcgttgtagccgaggggcgatgtgagggattccttttaaacatctgcttgactaggaactgaagttcataggagtaatgagacggcagtggactgatgcacccttgacatactttgagg

SEQ ID NO: 2037 - DNA, 176 bp, Homo sapiens
agtggcaggaagccgcgctgcactcaggagctgcaaccgccttccccggagccccggaacccggacgctcgctcagccctgcgccccgccgccgccgccgccgccaccgccgccaccgccaccgccgccacctcctagagccgcgcggagccgagcggtgcgagcgcgccgctgtg

SEQ ID NO: 2038 - DNA, 85 bp, Homo sapiens
gttgtgacctgaaggtcccgtcttcactaccttgtacatgcctggccctcctcgcaagaatggcatatcttgttcttgcattgtt

SEQ ID NO: 2039 - DNA, 103 bp, Homo sapiens
tggcaccagtatctcgtccacactgtcctttattatttacaccaaatgtccacacctctccattcttcattaaaacacaagtgtgagctttgcccatagctac

SEQ ID NO: 2040 - DNA, 43 bp, Homo sapiens
gaaccaggtgttcaccctccaatacctccaaagcccagttctc

SEQ ID NO: 2041 - DNA, 61 bp, Homo sapiens
ggcgggaaagccaccacttgcggagccccgcctacagcgtcagcaccatcgagccccggga

SEQ ID NO: 2042 - DNA, 27 bp, Homo sapiens
tgtggtgatgttacttcccgggatttg

SEQ ID NO: 2043 - DNA, 29 bp, Homo sapiens
atctgatcgggctgaatttcaagagctcc

SEQ ID NO: 2044 - DNA, 44 bp, Homo sapiens
agcccgcggaccgacccctactcggcggcgcaactccacaacca

SEQ ID NO: 2045 - DNA, 67 bp, Homo sapiens
tgctatccgacgacctgtcgccgggcaccgcagcatcctcgctcgctccgatgggacgagggacgcc

SEQ ID NO: 2046 - DNA, 36 bp, Homo sapiens
gagtgtgctcctcggctgccatacgcgccagcttcc

SEQ ID NO: 2047 - DNA, 33 bp, Homo sapiens
cataggaccccgaggatccaaaggtgcagtggg

SEQ ID NO: 2048 - DNA, 56 bp, Homo sapiens
agcccccgggattgcaggaatcccccagaagattgccgtccaaccagggacagtgg

SEQ ID NO: 2049 - DNA, 26 bp, Homo sapiens
gctcctgcctggcgcggttcagcacc

SEQ ID NO: 2050 - DNA, 194 bp, Homo sapiens
ggtctcgactctgcagattgggctttgcagaggattcctgtttcccacctccccacccctctgacagagactgaggagaccacacacgttgacctcctcttcatagccagccatcatttccactccaacattctgctgcgggtgtcattctggaaaataattccttgctgttccttgctcctttcagatcacag

SEQ ID NO: 2051 - DNA, 28 bp, Homo sapiens
ctcccacagcatcgcttccctgacggag

SEQ ID NO: 2052 - DNA, 28 bp, Homo sapiens
ggcctgggccgcgcgtagtcctcaacat

SEQ ID NO: 2053 - DNA, 64 bp, Homo sapiens
gcgcgcgctgatccgcagccaggagctgggcgacgagaagatccagatcgtgagccagatggtg

SEQ ID NO: 2054 - DNA, 34 bp, Homo sapiens
ccgagccccggagcgagagcgagtgcctgagcaa

SEQ ID NO: 2055 - DNA, 58 bp, Homo sapiens
atcaggaacactgaagagccctcccaaaggatttgatacgactgccataaacaaaagc

SEQ ID NO: 2056 - DNA, 56 bp, Homo sapiens
ctgaaagtcattgaagcttactgcaccagcgccaaaacaaggcaaacactcaattc

SEQ ID NO: 2057 - DNA, 1770 bp, Homo sapiens
gcactgccgcatccacctagaggtgtttgctcttgtccgctgtctgagtactgtgattctcagatgagtttgctgcgttttgggaggacacagacggttctgtataggctagttcagtaacaacaaaatacactgttttgtcttccctcaaagagagatcttactagaacctgtaaatagaatgtattatttattataagtcactgcagctgatgaaaacagatggaggccatgctgcaggctgatactgatgggtggagttttgtcatcaggccagcctcatcccgaggtctcctccaccattggccgtagccagcaggcttcagtgctcaccgaaagtaaaatcccctccttcagcaagaataaagcaatatacaccttaggttccactaagtaacataggcataagcagggaacgtttcccccactgtgttccagtgcagaggagacgaagcctgtcctcaccgcggctcgctgggcccaggctggctctggaaagcctgtgcggtcctgggcaggaagcccggcccgtggagcaggttttcgttctgcttcagcaataaataagggtgaccacagggactttgcttttggtttcctttcctgtgaaaaggttggttttaaagtgagatacacttttccgtagaacaagtgttctatctttaaaaacccaaattgcagcaccgtggattactggtctcagaacaactcattgcgcatcagatttgactctctgattttctgtctattggccaaattgccctttaactgcacctgaatcctttgtgtactgatgcctttgagctgggcaccttgggagagtgttgtgttgctgtttacggttcttccttgcccttgctaattacagtctctggtgcccagcaagcccctttggcttccttccgtgactggtcacgttgtctgcctgggctcagcgtggacctgccccatgctgcagaacctggcctcacctggacttttcactagaattgccagcttcctcaacttagcagatcattcactcatgcgggcacaagcaaagatcaacactttcttttttggtaagcttgagttttacaagttattttttggtgatgcgtaagacattgcagtgggaaaccattcaacttgagtttattggagtttgctgttgtagcaggttttaactcaggaacaactcttgtctgatctctccgcccctctgccgggaggcgacattaactgtcctctcggagccggtagcgttgctgtccgagtccccaggacggatctcctgcagacctgccttaatgctcagatcgaagtatttcacaagaatacttgtgtttttaacagcccttcccctggacggtgcggccatgagggcctcatgttacggcattgccttttctttctgtggatccagtatcttcctcggctttttagggagcaggaaaaatgcgtctgagagcaactctttttaaaaacctgccctgttgtatataactgtgtctgtttcaccgtgtgacctcccaagggggtgggaacttgatataaacgtttaaaggggccacgatttgcccgagggttactcctttgctctcaccttgtatggatgaggagatgaagccatttcttatcctgtagatgtgaagcactttcagttttcagcgatgttggaatgtagcatcagaagctcgttccttcacactcagtggcgtctgtgcttgtccacatgcgctgggcgtctgggaccttgaatgcctgccctggttgtgtggactccttaat

SEQ ID NO: 2058 - DNA, 29 bp, Homo sapiens
cctcgccctccatcgtgtggagccctcag

SEQ ID NO: 2059 - DNA, 60 bp, Homo sapiens
ggcctccaaagcaaacgacgttctggtgaggtggaagcgtgcgggctcctatcttctgga

SEQ ID NO: 2060 - DNA, 71 bp, Homo sapiens
ccctatagacctcacagtgaacatactcacaatgggctactggccaacatacacgcccatggaagtgcact

SEQ ID NO: 2061 - DNA, 334 bp, Homo sapiens
gaaataccgcccacgtttgccatgctgcacccagagtggccccgagcctccactccctcttaggaaactactgactcccaggcctgagcctctcctggcgtcttggcttcctcagaaggcctgtcaggtacagctcccacaacgccctcatcaggacctgagtctatacggcctgcgccaggtccaggacccagtggggaggccgggcctcgggaagccacacttctggcaccacacacagcagatgagtacagccattaggaccaggagcagcgtccgcagtgccagggccaagaagacagggccgccatagacaggaaagccctcggaggcc

SEQ ID NO: 2062 - DNA, 28 bp, Homo sapiens
gcgaagagcgggcgtcatctctcgggag

SEQ ID NO: 2063 - DNA, 74 bp, Homo sapiens
tctcatctgtagcaaaaagccgggctccacgttcctggcacattgttgccatcatctcctgtagcctcacatta

SEQ ID NO: 2064 - DNA, 25 bp, Homo sapiens
ggatggtggctttgcagcagtctcc

SEQ ID NO: 2065 - DNA, 54 bp, Homo sapiens
aaggaacagatatgattgctaggcaacagagtgaaggtgcatttcagagaactg

SEQ ID NO: 2066 - DNA, 38 bp, Homo sapiens
tgagtagaggggacggagaagggtgttctgttactgac

SEQ ID NO: 2067 - DNA, 48 bp, Homo sapiens
tcttgccttgttactccctttacatctggaaggtgtaaaaaccacttg

SEQ ID NO: 2068 - DNA, 240 bp, Homo sapiens
cactctcccaatgacccggaagtatcgacctcaaagatgccctttccgcttccgggtcccaacagcgttaggttttttttttgtttgtttgtttgttttgtttttttccaaccctctttcggatggacgggggaaagagagaaagaaaaacgagggaaaatcaacaaaatgtgcgatgcaaagagtcgattttcgcggggtttgtcaacttcgccactgccgcacgcgaatcgacgtcgt

SEQ ID NO: 2069 - DNA, 90 bp, Homo sapiens
aaagaagtgaaagcaggatctcggccaggcacagtggttcacacctgcaatcccagcactttgggaggctgaaccaggcggatcacccga

SEQ ID NO: 2070 - DNA, 25 bp, Homo sapiens
gagaggaaacccttcaccagcttcc

SEQ ID NO: 2071 - DNA, 25 bp, Homo sapiens
tatagatagggaccgtggactcggg

SEQ ID NO: 2072 - DNA, 98 bp, Homo sapiens
cagcgacggcgttggatgccagcagctcctggggggacattgcagtgacataagcgacattggcaaagacatacacaaatgtgaccagtgggatggag

SEQ ID NO: 2073 - DNA, 26 bp, Homo sapiens
gcaaaaggggtgaggcatgtccctcc

SEQ ID NO: 2074 - DNA, 181 bp, Homo sapiens
aggtactgcgttgtcccgaaaccactttagttgcccatgcttcaaggcatagcgtgtgtcaccaaaccactgaatgatctcaggccgaggtaaaccagtgatctgttctaacttttggtaatcctcacgccgtgcccactggcactgtaaaaaaaaggatttaaggatagccagctgctct

SEQ ID NO: 2075 - DNA, 158 bp, Homo sapiens
gttggcgggcacaatgccctgctggccgtgtagggagcagaggcaccagccgtccagtccaccagcgccctctctctgcaggacccgtaggacatcccctcggcggaaggacagctcctggggggactcagcggtgttgtcatacagtgcccgggcca

SEQ ID NO: 2076 - DNA, 40 bp, Homo sapiens
ggtggagagccgacaccgtctggaaggatgagcccttttt

SEQ ID NO: 2077 - DNA, 106 bp, Homo sapiens
cggactctgaggaccgtgcggccaggactctcggaggcaccgctgcctccactccagaagaagaggcgccggggcctgtttcactttcgccggccccggagcttca

SEQ ID NO: 2078 - DNA, 120 bp, Homo sapiens
aaagggcacggcaaggagagaacgagtgatgatgtgtagggttggggagagtgcagtgatgggagcacagaccagggtgggagatggagcttggggtctcaatagtctcccttctttgcc

SEQ ID NO: 2079 - DNA, 26 bp, Homo sapiens
atactcatccaagacagcaggcactg

SEQ ID NO: 2080 - DNA, 24 bp, Homo sapiens
caagcaggacttccgggaggacca

SEQ ID NO: 2081 - DNA, 76 bp, Homo sapiens
ccaccgaagttccaggtaacactgaatttctgggaagagagccatggctccagccatactccacagaatcttatca

SEQ ID NO: 2082 - DNA, 84 bp, Homo sapiens
cctgagggttatggtagggtcccactttgttgacatacagaataacagggtcgccggccttgtagtgtgtcacgccttccaccc

SEQ ID NO: 2083 - DNA, 115 bp, Homo sapiens
ggaccgcgtatgccagctgtgccacccgtcgccggtccacgccgccgcccacctgagcctggagactctgaccgctttcgtgcttcctttcgggctgatgctcggctgctacagc

SEQ ID NO: 2084 - DNA, 62 bp, Homo sapiens
agtccttctaagccgggagtctcaggcccggcttggggcagctcagccaatgaaggccggtt

SEQ ID NO: 2085 - DNA, 24 bp, Homo sapiens
atgcctctcctccgagggtgccca

SEQ ID NO: 2086 - DNA, 82 bp, Homo sapiens
cagccacgttgcccggcggtgttggtgaggctcgatgccggcgtgcacggcaagcgcgaattcggaacctggcgcccttgac

SEQ ID NO: 2087 - DNA, 124 bp, Homo sapiens
gttggcgtcctcgtggtctgggtctggatcttgcatctcgccactgtcgttctggcactctgccattgccatctctgcatcttggaccattgcttcttccatatcatccatgagcccactgttc

SEQ ID NO: 2088 - DNA, 29 bp, Homo sapiens
agcagccagtattcgggaaaggcagacag

SEQ ID NO: 2089 - DNA, 24 bp, Homo sapiens
ttggaagatgatatgtttgtatta

SEQ ID NO: 2090 - DNA, 71 bp, Homo sapiens
caatccttcgggtacattccgcagatacatccaggtagtatgttatggcacgggctgtcacctctaataca

SEQ ID NO: 2091 - DNA, 25 bp, Homo sapiens
tgcactttgctccagccttttcacc

SEQ ID NO: 2092 - DNA, 121 bp, Homo sapiens
tgccagtccattcccgaggggataagaaggagaccaaccatcacgatgagatggaggtggactacgccgaaaatgaggggagcagctccgaggacgaggacactgagagctcgtcggtctc

SEQ ID NO: 2093 - DNA, 95 bp, Homo sapiens
agctggccggtcttcccgtgcacaccccgatggaggggcgagtcggcgctggggttagaggcgccagaggggtccttgcggctctcagggccgcc

SEQ ID NO: 2094 - DNA, 116 bp, Homo sapiens
tggcattggaaatctggagtgaagaatttcctgtgcatcatccactggggcttgcagaaggtggcggaaattttcatactcaggcatatcctggtatcctgacttccgccactgtg

SEQ ID NO: 2095 - DNA, 100 bp, Homo sapiens
ggataagaattcccggtccgacagaaagaggtctatatcagagagtagtcgatcaggcaaaagatcttcaagaagtgaaagagaccgaaaatcagacagg

SEQ ID NO: 2096 - DNA, 56 bp, Homo sapiens
ttcaccaaatttgtagatgaggggaaagccactgttcggttaaaggagcctcctgt

SEQ ID NO: 2097 - DNA, 260 bp, Homo sapiens
ggatcctcatgttgggcctggacgcggccggcaagacaacaatcctgtacaagttgaagctgggccagtcggtgaccaccattcccactgtgggtttcaacgtggagacggtgacttacaaaaatgtcaagttcaacgtatgggatgtgggcggccaggacaagatccggccgctctggcggcattactacactgggacccaaggtctcatcttcgtagtggactgcgccgaccgcgaccgcatcgatgaggctcgccag

SEQ ID NO: 2098 - DNA, 29 bp, Homo sapiens
ggtctctgagcagcgactcacctgtgcag

SEQ ID NO: 2099 - DNA, 32 bp, Homo sapiens
ggcggccccgtctttgttgagcgcggagcccg

SEQ ID NO: 2100 - DNA, 31 bp, Homo sapiens
taggcgtcgcagtggacctcaggtgctgcat

SEQ ID NO: 2101 - DNA, 119 bp, Homo sapiens
tgggcagacggaacccgcgccagtaccagatcccctctcggaacgtcccttccgcccgcctgggcctcttgggcaccagtggattcgtcagctccaaccagcgcaacaccacagctacc

SEQ ID NO: 2102 - DNA, 33 bp, Homo sapiens
cgccagcagccgtccggagccagccaacgagcg

SEQ ID NO: 2103 - DNA, 92 bp, Homo sapiens
agtagcaggtttgttggcagatgctcgttctttagcagacatagcaagagaagaagcttccaacttcagatctaactttggctacaacattc

SEQ ID NO: 2104 - DNA, 335 bp, Homo sapiens
ttaagaattcgaaacaggcgtgtctgccctctggcgggataccttctctgaacaatgggacattctccccaccgaagcagtggtcgaaagaatcaaaggccgaacaagccgaaagcaagagggtgcccctgccagagggctgcccctcaggcgctgcctccgaccttcagagtaagcacctgccaaaaacggccaagccagcctcgcaagaacatgctcggtgttccgccattgggacaggggagtcccctaaggaaagcgctcagctctcaggggcctctccaaaagagagtcctagcagaggccctgccccgccgcaggagaacaaagttgta

SEQ ID NO: 2105 - DNA, 561 bp, Homo sapiens
ggatctggacaatgccatactggttaatttgcactggtgtagtaaaagtcactacagaccctccatcttgggaagccactgtttgaatgccttctcttttcacctcagtgctgggtatcaggcctgggaatgagacagggacactggggctgtaggacgtggtggttgctgagttagcagaactctggaggactttgaattccttcacgtcctgggaagtagaccccagtatgtcagtcatggatataccattgctcacaatgtttgatgacatttttggtgggttcaatgccactgcctgtgtatttcccacatttaatccattaaggataactccactgggtccctgaataaaagaatttccattaaggaagacaggtgaagtacttgcaggtaccaagcttccattcaacagaactccagaagagcttaatgatatcttagcatttccaatttgttgcatatatactggctccatatgactggaaaggctgaggttggtgatgccatcagatgaactggagagtgggtgaggagataaatcctcatgtcccttgctgg

SEQ ID NO: 2106 - DNA, 56 bp, Homo sapiens
aagggccgggctcaaagctccgcctctggcgcgaccgacgactggagcgcagggca

SEQ ID NO: 2107 - DNA, 37 bp, Homo sapiens
ggccgcccgccgtgaagacatcgcggggaccgattca

SEQ ID NO: 2108 - DNA, 144 bp, Homo sapiens
catcaggaggttagccaggcgcatggattgctgctgggaggagatgccgctcttggcaatcacccaaaccaaagcatcggtcacggcgttcagcaagtgagccagcttccggctgctgtcagcatcctgggtcgctgtgaccag

SEQ ID NO: 2109 - DNA, 28 bp, Homo sapiens
gatggtggagatgtgcgaggagtggaac

SEQ ID NO: 2110 - DNA, 89 bp, Homo sapiens
ctttgctggtggagtgtgtagaacaaatgtgcagcttcctggcaaggtagtggtgatcactggcgccaacacgggcattggcaaggaga

SEQ ID NO: 2111 - DNA, 26 bp, Homo sapiens
tgcagcctggtggacaatttcttgga

SEQ ID NO: 2112 - DNA, 69 bp, Homo sapiens
tgttgcatggcatgcatggtgttctcgggcacccggttctccagccacgggattgtgcggcggatccac

SEQ ID NO: 2113 - DNA, 24 bp, Homo sapiens
catcatggaggataacttgctcat

SEQ ID NO: 2114 - DNA, 24 bp, Homo sapiens
tcatttgaaccaagaaggcagaag

SEQ ID NO: 2115 - DNA, 89 bp, Homo sapiens
aggctgtgcaaggggagcagtcctcccctttgtaggtgccatttcccagagctcctggaattgtttcttcagttgtggcagctgtgtag

SEQ ID NO: 2116 - DNA, 50 bp, Homo sapiens
gagagcgacgccagggccaagactacagaggcggatgaccccttcaagga

SEQ ID NO: 2117 - DNA, 195 bp, Homo sapiens
ctcccgagcggagtgggcaagggaggggggtgaggaaggtacgcgatgcccccgccgcccggcgcctcaccggtcgcagcggctcatcgcccccgcgggctgcccgccggccgcagccgcgtccggggcatgtcagtccgccgccgccgccctcccgccggggttcgtgggctcgcagctgtcagggagctgcgg

SEQ ID NO: 2118 - DNA, 51 bp, Homo sapiens
aagtggaaatgtggagattctgatggggtacttaaaccattagctttctca

SEQ ID NO: 2119 - DNA, 87 bp, Homo sapiens
ctgaatgggcgggtagcaactggggtcctcgccgccgggctggcagcggctggagaaggcgctgcgcggggtcacgtagttgctggg

SEQ ID NO: 2120 - DNA, 1130 bp, Homo sapiens
gataggatttcagcacaacgggccctttccagtcatgacagacagagatgtccaggctcttgaggagaaacaaaagttcctttgacttctcttgcaaggaccaaagagataaattttttctttacgatctgttgaaatatttatatagacttttaaaaacaactaacagttcatcctgtgctcagtttccctggaaggtttctcatgatcgcccctccgagagctagaggggttgtgtgtctgggaacaaaggattaagacactttaaaataagcaatgaaaatcctagtgcgacactcagaagcagatggtgggcttgagggggccgaggggtgggaggcagatgcttcgattgaggagctgggtgccgccttttgggaaagccgagtggagacagaagcatcgggacaggaagccctgctggagaaggctcagttccttccttgctgttccctgggggaccagggacagcacggcccctgcatttctacttctcagggccgaagacccgacctctgaccctccacccactccggtgacctgcacgctaagttgggtggtctctgactaaaacaggcttaagccaagaattgggactcgactcccaggagacctagggagaattcccttcaggctgtttcaggcaggaaggaccagggaggctcactccccaggcagctgacaggcatggagggaagagccaaggacaggagaggcttccaaggctccaagagcagcagaggaaggggccagccacgtggtggccatggacctggctcggctcatgaggaagacgtgctgccactgccacctcaccctgtgcggaggagactgtgcgaagtcttcacagccagcagcagcctcgatacgccccgagtgcctttcatatgtatatatgagagagagatatacacatatatattcattatttttaactgaaataaatgcaacggattcaggttcattcccctttgcgataagttgcaaggtcccctgccctgaggggtccacaccttcgggcctgccgccaggctcacccccactgagggaaagtggccctggatgcggagaggagaggacacacaccacagcaggtgactgggaggagggcctacctcgcaagactgttt

SEQ ID NO: 2121 - DNA, 104 bp, Homo sapiens
cagacaccttgagttccttggtttggtccacgtcccatgaacatgcagcagagctagttagcatggatgaggaaaaatttgtggatgccgttaactctgccttt

SEQ ID NO: 2122 - DNA, 145 bp, Homo sapiens
tacgcaggccatgtgggccgcatccagctggaagccctcaaaacagtcacaggtgtagccctcccgcacgcgcacacagcggccattctcacagccgttcaggatgccgcactcctccgcctgaagcccttcgaagccggctggg

SEQ ID NO: 2123 - DNA, 74 bp, Homo sapiens
cagccgctgccgggtagctgcccccagggcgccgcagtcgattcgcgtctccaccagccggctcgtatctccct

SEQ ID NO: 2124 - DNA, 93 bp, Homo sapiens
gaatcattcctttggtgaaacgatagggatacaagatgttgtgaattttaactgctaagctctcagcctggccactgcttacatcaacagcaa

SEQ ID NO: 2125 - DNA, 74 bp, Homo sapiens
ctgcacgcacacgcaggaggagtcagtggtgttcccttcccagcacaggttactgcaggattcagccgaggtga

SEQ ID NO: 2126 - DNA, 105 bp, Homo sapiens
gttccagagcttcgatgacacccctctggggacggcctccctggcccaggtccacaaggcagtgctgcatgatgggcggacggtggccgtgaaggtccagcaccc

SEQ ID NO: 2127 - DNA, 202 bp, Homo sapiens
tcgagaggagaatgtggccactttccgaggctcagagtatctgtgctacgacctgtctcagaacccgatccagagcagcagtgatgaaatcaccctctcctttaagacctggcagcgtaacggcctcatcctgcacacgggcaagtcggctgactatgtcaacctggctctgaaggatggtgcggtctccttggtcattaac

SEQ ID NO: 2128 - DNA, 25 bp, Homo sapiens
cagtaaccagatatggagattgcaa

SEQ ID NO: 2129 - DNA, 108 bp, Homo sapiens
cagatatagattccagtgatgagagtgatattgaggaagatattgaccagccatcagctcataagacgaagcatgacttgatgatgaaaggtgaaggcagtcgtaaag

SEQ ID NO: 2130 - DNA, 120 bp, Homo sapiens
atggcccaccagaggccagtcaagatctggcagagtgctgtcgcgcctttggtgggaaagatattaaagtgtacatgccaaagctacatgaaacagttgatgccactagtgaaactcaca

SEQ ID NO: 2131 - DNA, 25 bp, Homo sapiens
gctcttctgctctgcgccgggcaag

SEQ ID NO: 2132 - DNA, 145 bp, Homo sapiens
caatgacggcgtgctgccctgtctggttgttgatgatgatgtcgatgccgaagagtgacacgcccagtgcctgccgcagggcccgggagagctcccggatgacctcgtcgctcggccgctcgaacacgccctcgatcttgtccag

SEQ ID NO: 2133 - DNA, 127 bp, Homo sapiens
gggaacacatgacatgatttgtgaatatcatcatctttgccagacaagtctccaggggatccctgtttcccaactgaaaggtgtgaacggacacacacacagcctggatgacgccttggctgttcta

SEQ ID NO: 2134 - DNA, 24 bp, Homo sapiens
cagcgaggagccaactatcccaaa

SEQ ID NO: 2135 - DNA, 70 bp, Homo sapiens
cattggccggggacacacagtagattggagcacagaggccaacagcaaagagtactccataaaggtaaga

SEQ ID NO: 2136 - DNA, 28 bp, Homo sapiens
tgatgactttccacacggaaacaggaag

SEQ ID NO: 2137 - DNA, 826 bp, Homo sapiens
aactgcgctcgatctggattccagtgatcctctgcagtgcccacctgcctccagggagcgactgaagaagccgactgccgggggaacacctggattcatgaaccaaagcagcctcaagtttcatgttgtcaaggcagggtatcagaatctttctgagggcaaagtattattaacaaataaaaatatcagtattttaaaagacaattacaggagtgttagaggtcattctaaatttcatcacttcacgtaatataaaagaaaaaagaaaagaaatataacaaacattttaaaaacataattaagagttcagttaacaaatctgtttcatactttcacaaacagtaaaaatgccacagacaaaaatgacctatttaagttgtgcgagtatatgacacattgcaggcattataattatctttttcaaattccataaatcaaaacagcagcaaggccaaaccacatttttttcctctctgttaagcatattttcttgaaatgaggtaaagcatggtaccaagtgcaatgcttatctgtgctacatgaacagaacagaagggaaaaagctattataaaacgcagcatagttaggactgcggaaagcatattataaaagaaattttaaaaaatttacaaatgaaggttcatgttaactaacttgcacacaatcatcataaggaatttctgcagttgctttttcaagacacgcctccccagtcctttacacacgtgctcagggcacaaccacaccccactggtaggttttccatattacattcggtctcacattgcaatcacaggaacacagggtggcacacagggctctaaa

SEQ ID NO: 2138 - DNA, 121 bp, Homo sapiens
ggtggtcttcctcaaggggacgccggagcagccccagtgcggcttcagcaacgccgtggtgcagatcctgcggctgcacggcgtccgcgattacgcggcctacaacgtgctggacgacccg

SEQ ID NO: 2139 - DNA, 26 bp, Homo sapiens
tgggcgtggtgtatgccttcaccttc

SEQ ID NO: 2140 - DNA, 54 bp, Homo sapiens
ggagcaggccacactcaagccactggaccccgtgctgtgcaccctgcggccccg

SEQ ID NO: 2141 - DNA, 65 bp, Homo sapiens
tggaggaaccaatctctgtgctgtggatgactccaacgaccatgtgctctctgtatgggactggc

SEQ ID NO: 2142 - DNA, 39 bp, Homo sapiens
cttgtattcacaggaaggcagtgggagattgactgccaa

SEQ ID NO: 2143 - DNA, 99 bp, Homo sapiens
ccttgcacccgagagagcccgtgttcctggcacagaccaatggcaactacctggcccttttctccactgtgtggccctaccggatgagcagacggcggc

SEQ ID NO: 2144 - DNA, 108 bp, Homo sapiens
cccctttgtgaccagtgcgtgacctctcccggctgccttcacggactctgtggagaacccgggcagtgcatttgcaccgacggctgggacggggagctctgtgataga

SEQ ID NO: 2145 - DNA, 24 bp, Homo sapiens
tcctgcccgaagcctcaggaggtc

SEQ ID NO: 2146 - DNA, 39 bp, Homo sapiens
gccgggagctgtacttctatatctacaagggggtccgca

SEQ ID NO: 2147 - DNA, 74 bp, Homo sapiens
tgccctgcctccggtgccggtggatgggggagggactggcctctgactgcggggttgcaccatggcggcggtcg

SEQ ID NO: 2148 - DNA, 101 bp, Homo sapiens
gccggaccacgcggtgctgcttctccagcccccgcagccgctgcgtggagtcctcacgctcttggcgaagcgccactgtgtcctcaagctgtcgctcgagc

SEQ ID NO: 2149 - DNA, 31 bp, Homo sapiens
gccaaggccgagagcatcacgctggacttgg

SEQ ID NO: 2150 - DNA, 88 bp, Homo sapiens
catttctgggcaggcatgaggtcgtcgatggcctggccctgctccagccgctgctccatctcgatgagcagcttcactccgtccacca

SEQ ID NO: 2151 - DNA, 34 bp, Homo sapiens
ttctgggattcaggtccagtagatccaaatccat

SEQ ID NO: 2152 - DNA, 39 bp, Homo sapiens
ttttgcaatgcctttccggcagcatctcgatggatatag

SEQ ID NO: 2153 - DNA, 119 bp, Homo sapiens
gtcggccgagtacctggcggccctggagcgagccacggcggccctggagcagtgcgtgaacctgtgcaaggcgcacgtcatgatggtcacctgcttcgacatcagcgttgcagccagtg

SEQ ID NO: 2154 - DNA, 25 bp, Homo sapiens
ctggaacagccctcgcaagcagcag

SEQ ID NO: 2155 - DNA, 65 bp, Homo sapiens
tgcaggagatcccgtgggcagcacgcgctgtcccgcctctgagcccggccttgatgctacaacag

SEQ ID NO: 2156 - DNA, 103 bp, Homo sapiens
agcctcacgttggtccacatcctgcggccgctccttgtagccaatgaaggtgccatcattcttgaggaggaagtagcgtggccgccaggtcttgatgtactcc

SEQ ID NO: 2157 - DNA, 224 bp, Homo sapiens
aagaatttctgctggctcctcatctgaacagctgtctgcaagctggtggccagaaggaacttcaaatgtgagtgtttgctgtcccagtacattgacgctggaagagatcatctcaaatggttctccagtgtcaggctggagatctccagaaatggagtctactcctggggtggcttgtatgggagcctcttctgtgccctcctgagtcctagagtgttgagtca

SEQ ID NO: 2158 - DNA, 31 bp, Homo sapiens
gtgagtgcaagtacgaccctcccagccgtcc

SEQ ID NO: 2159 - DNA, 36 bp, Homo sapiens
ctcctcttccgtgtgctctcgccactccctgcgggc

SEQ ID NO: 2160 - DNA, 45 bp, Homo sapiens
atgcgacgaccacgttcccatcttggggggtgctgtcgaggctca

SEQ ID NO: 2161 - DNA, 121 bp, Homo sapiens
aggggctggcgcatcttcctgcacacagaagagtccagggtgggtcctttctgctctctggtagccacagatgaggtacagaggctgcttcccttctctgcaggtacagggcgtcctgctc

SEQ ID NO: 2162 - DNA, 31 bp, Homo sapiens
gcccaccacacaatgtctgttaaataggaag

SEQ ID NO: 2163 - DNA, 31 bp, Homo sapiens
gggcactgctgggcgttcttcatcccacaaa

SEQ ID NO: 2164 - DNA, 63 bp, Homo sapiens
aaactcctggatcaatctagactcctgcctcagcctcccaagtgcctgttagtacaggcttga

SEQ ID NO: 2165 - DNA, 80 bp, Homo sapiens
ctccatcctggacggcgaaacgacctcgggagaccccggttaggaccttactccagggatcaactggaatcaaaatccaa

SEQ ID NO: 2166 - DNA, 146 bp, Homo sapiens
tcccatcagccgtcacagcaaagagggtctgttcccctccgattaactgcacgggtctgagagttgcaagggcttcacagggagtgggaactttgacttttgcgccttcaatgcccccgagctggcccctgtgattatgtccccat

SEQ ID NO: 2167 - DNA, 24 bp, Homo sapiens
tcaagaaatcagctcgttttttgt

SEQ ID NO: 2168 - DNA, 24 bp, Homo sapiens
ttttgtcatgttcactgaattgat

SEQ ID NO: 2169 - DNA, 190 bp, Homo sapiens
catgcgctcactcttcggtgcccggccgggccggcgcctcgcagacgcggagccgcgcgggtgacggcacaggcggctgcgcgcccagcccagcccagcccagcccgaggagagggcgcgccgcgcccccgccccccgcccgctctcccgaggccgtgggtgcggatgcgcggctgacgactcgcagcaa

SEQ ID NO: 2170 - DNA, 129 bp, Homo sapiens
acgtgctggccgacgcaccagactcctccttgctgcccttgcgcgacttggccttcttctccttgccccgctcggccgagtccccgttcttgccattggcggagttggcgcggcccatcttgccgtgca

SEQ ID NO: 2171 - DNA, 87 bp, Homo sapiens
gcattgccgggaccggatatgagcatgaaacctagtgccgccccgtctccatcccctgcacttccctttctcccaccaacttctgac

SEQ ID NO: 2172 - DNA, 60 bp, Homo sapiens
tgcaaaaaggtgtcctgccccatcatgccctgctccaatgccacagttcctgatggagaa

SEQ ID NO: 2173 - DNA, 248 bp, Homo sapiens
cagcccactcgacaggaatggaaacacagaaggaggcattcgatggtcaaggagggcgctctccgctcccgctgcctccttcaaccgcgggtcctccgcccctcgagggctagggcatccctctccagtcccctcgggctgacgcactcgacccctctccttagcgggaggagaacgtttggccgaagctatttttcagtcctgttggcttcgaggctggatggcgatgtgaagccaacgtaatgccc

SEQ ID NO: 2174 - DNA, 35 bp, Homo sapiens
tcgggggctggacgcccagactcgattgggaagga

SEQ ID NO: 2175 - DNA, 70 bp, Homo sapiens
gcacgcgcccgtccacgccctcagggccctcgcccggcgcggctccggcgctctcctcgcggggcaggct

SEQ ID NO: 2176 - DNA, 601 bp, Homo sapiens
ggctggagcccgaaggtatttctccagatccacagggagaggtctcaccctccagctgtggatgttaaaccctgccagatgtcccagccttgatctgtctgctcctactcctcacatctggaggattccagcaggaggggttttggaggggacctgcttgcgacctgctgagggcttgtctgctcccacagcaccatctaagacccctcctctagaagtggggaaggccagatgtgtagcttcgggtatcagaggaggctgacctggcccccatcccaagttacaagaacttcagtgagactaagggacccccatcctagggatcttgtcagggttccttactgaccagaggagcccgcagcaatctccacagcctcctgggtctcacccctttcatgggctcttcatcaggacacttccctctcttttgggagcttctctgggcagaattgggctgggacctctctccccaactgccctgctctcctcatactcaccggtttgaccagaaattctccaaatccagccatagatggctgctgggtgtgcagcaggagaaggaggatggtcagccttggagcatctctcaattacgggacag

SEQ ID NO: 2177 - DNA, 29 bp, Homo sapiens
ggaacctgggcgtattgggcatcacagcc

SEQ ID NO: 2178 - DNA, 80 bp, Homo sapiens
tctgtgaacgtggctcccgaggaggccgtgaagtagacagagctggagccagtggagtcactcctctcccggacaaacgg

SEQ ID NO: 2179 - DNA, 26 bp, Homo sapiens
gtggcccagggagcactaattccaag

SEQ ID NO: 2180 - DNA, 32 bp, Homo sapiens
tctgaggccggctgagtctccggagtttcttg

SEQ ID NO: 2181 - DNA, 100 bp, Homo sapiens
cgtgcggatctcgggcagccatttctctgtgatgttttgaaaggagctgggctgcaccacgctgaagcacgccaggaagacatcggtatccgggtagcaa

SEQ ID NO: 2182 - DNA, 481 bp, Homo sapiens
accacttcaaggaggcgatctgcagctcacttaaggcctacaaccaccacatccaggagctgcagcgggagatggaagaggctacagccagtgcccagcgcatccggcgagacctgcaggagctgcggggccgctacggcactgtggagccccaggacaaatgtgccacctgcgacttccccctgctcaaccgccctttttacctcttcctctgtggccatatgttccatgctgactgcctgctgcaggctgtgcgacctggcctgccagcctacaagcaggcccggctggaggagctgcagaggaagctgggggctgctccacccccagccaagggctctgcccgggccaaggaggccgagggtggggctgccacggcagggcccagccgggaacagctcaaggctgacctggatgagttggtggccgctgagtgtgtgtactgtggggagctgatgatccgctctatcgaccggccgtt

SEQ ID NO: 2183 - DNA, 72 bp, Homo sapiens
atggtgttctgaattggggtcccggttagcaaaagccgattccgacactggaactgtaagaggatcttccaa

SEQ ID NO: 2184 - DNA, 98 bp, Homo sapiens
atcccacaacaaggaacggcgttccaagcgggatgagaaactagacaagaaatctcaagccatggaggagctaaaagcagagcgagaaaaacgaaaga

SEQ ID NO: 2185 - DNA, 233 bp, Homo sapiens
gtccccaaagagcgggtaaatagctaagccactcttcactcccagtacagaccttcagaagccccagatatcaggatgtaatggtagggctcactgctctaaaacagctcaaacaacctgctcccaggaaggcaagccttctgctccttggtctcctgcctaccattaggacacaatgttcttcgtctggccagacatctgttgaaaggctggatacaggacaacgtacccat

SEQ ID NO: 2186 - DNA, 168 bp, Homo sapiens
cgcgctgctgacggcggcgaccgcggccggaggcgggcgcgggtctcggaggcggtcgcctcagcaccgccccacgggcggccccagcccctcccgcagccctcctccctcccgctcccttcccgccgcctcctccccgccctcctccctcctcgctcgcgggccggg

SEQ ID NO: 2187 - DNA, 738 bp, Homo sapiens
tgtggtagtcctcccaagctgtgctgggaagcccggactgaccaaatcacccaatcccagttcttcctgcaaccactctgtggccagcctggcatcagtttaggccttggcttgatggaagtgggccagtcctggttgtctgaacccaggcagctggcaggagtggggtggttatgtttccatggttaccatgggtgtggatggcagtgtggggagggcaggtccagctctgtgggccctaccctcctgctgagctgcccctgctgcttaagtgcatgcattgagctgcctccagcctggtggcccagctattaccacacttggggtttaaatatccaggtgtgcccctccaagtcacaaagagatgtccttgtaatattcccttttaggtgagggttggtaaggggttggtatctcaggtctgaatcttcaccatctttctgattccgcaccctgcctacgccaggagaagttgaggggagcatgcttccctgcagctgaccgggtcacacaaaggcatgctggagtacccagcctatcaggtgcccctcttccaaaggcagcgtgccgagccagcaagaggaaggggtgctgtgaggcttgcccaggagcaagtgaggccggagaggagttcaggaacccttctccatacccacaatctgagcacgctaccaaatctcaaaatatcctaagactaacaaaggcagctgtgtctgagcccaacccttctaaacggtg

SEQ ID NO: 2188 - DNA, 37 bp, Homo sapiens
cgtgcggagcgagttacgagaattcccggccgctgca

SEQ ID NO: 2189 - DNA, 81 bp, Homo sapiens
tgtgtgtttcctgccgtggcggccccgcagcctctcacaccgggctcccgtgaggtcaaggagggctatggaagctacttt

SEQ ID NO: 2190 - DNA, 24 bp, Homo sapiens
attcccttggctggtgctggtcct

SEQ ID NO: 2191 - DNA, 70 bp, Homo sapiens
acaaacccttgtccctttgccatgtggaggaaagtgcctgcctctggtccgagccgcctcggttctgaag

SEQ ID NO: 2192 - DNA, 95 bp, Homo sapiens
agagagttgcccaaaggtagacggcagctctctaaggtgattgttgtttaggcttagcgtctctagttttttcagattgcatatctcatcaggca

SEQ ID NO: 2193 - DNA, 26 bp, Homo sapiens
tttatctcggagatgaggtgggaggg

SEQ ID NO: 2194 - DNA, 66 bp, Homo sapiens
agctggacttagttcagggtcgctgtccttggcagtcaccatcctccgggcagtgaggagctgaaa

SEQ ID NO: 2195 - DNA, 99 bp, Homo sapiens
tgcatacaggtaagaatcttcaaaaaagatcgaaaaccttcaaggaactgcattcttaatctttctgtccatattgtgggtttgctgatcaggatatac

SEQ ID NO: 2196 - DNA, 90 bp, Homo sapiens
atggcagtggtatgcaactgggcctctgcgagctcacagtcaagagctctttgtaggctgtatatgacgtggtcatatgaatggtgttca

SEQ ID NO: 2197 - DNA, 26 bp, Homo sapiens
cctcggtggccttggaaagcaatcac

SEQ ID NO: 2198 - DNA, 33 bp, Homo sapiens
ttgatggcagcgacggtgattcccgaaacttga

SEQ ID NO: 2199 - DNA, 65 bp, Homo sapiens
cttcttcacgctctctttgagtttcttttgtagcttcttgtgttctcggccccggaaataggcca

SEQ ID NO: 2200 - DNA, 143 bp, Homo sapiens
agtacggtgcggttgtggagcgacggcaggccggctatgccccgcgtggctgcgttgctgagccggcgcgggttgggcagctgcggctcctccagagcctgatacacaccgtcggcgtaattggctggtacgcggcgctgcaa

SEQ ID NO: 2201 - DNA, 34 bp, Homo sapiens
ttgggaaactgtggaccctactgtacctcaaaag

SEQ ID NO: 2202 - DNA, 24 bp, Homo sapiens
tctggaagtgttagttgcaaagat

SEQ ID NO: 2203 - DNA, 190 bp, Homo sapiens
aatgtgtcttttccagccctgatgttgggggtggatttttagctcgcatattttttccagatgtgataagctctccatagccttcttggtgagcaaaagcatagccagaccttcttgagcttgacctgcgggtccgaggccttcggctacttggaggccttgccttcttttgagccttctgccaccggcg

SEQ ID NO: 2204 - DNA, 43 bp, Homo sapiens
tggataccagtttaccaagcaagggccacgaacaagggtggca

SEQ ID NO: 2205 - DNA, 127 bp, Homo sapiens
acacgaaggtgtttccagtttctgagggggccaggtccaagcagaggacgtcagccccatgtccgtggaagctctgcagcagctgcccgctctccacgtcccacagggcacatgtgccatcgccgct

SEQ ID NO: 2206 - DNA, 26 bp, Homo sapiens
tttgtgtagagctccgacgcagccat

SEQ ID NO: 2207 - DNA, 53 bp, Homo sapiens
tagcaacaagggacggcttccgttgaggaaggtcttgcggagtgggaatgtgg

SEQ ID NO: 2208 - DNA, 24 bp, Homo sapiens
atactcattaacccacctgaaaac

SEQ ID NO: 2209 - DNA, 34 bp, Homo sapiens
ccaggagcccgaacacctccaccgcgcaagttgc

SEQ ID NO: 2210 - DNA, 43 bp, Homo sapiens
tgctgcgctccacgtccacggtcaccctgctctcgggcggcgc

SEQ ID NO: 2211 - DNA, 33 bp, Homo sapiens
tgcagaaggcctccgggtagcaaccaacgcagc

SEQ ID NO: 2212 - DNA, 49 bp, Homo sapiens
agagttggatcgtgcccaggagcgtctggcaacagctttgcagaagctg

SEQ ID NO: 2213 - DNA, 85 bp, Homo sapiens
tgccctgcattcggctgctggaggatcccaccctgactgtgtgcagctcctcctcagggctgggagcaccgtgaatgccctcacc

SEQ ID NO: 2214 - DNA, 1092 bp, Homo sapiens
aggccctagggttggacaagaagccagttctaggctccaggttaatcacggagatcacaaccccctggatctgctcactaggcaagaacctctcactccggtaggccctcaccttaacaaagcaccgcctgctttcaggaacatccaggttaaagagcctcctctcacgaatctccaggttgcccaccaggaaggttctgtcttctcttttgttcctcctttgattttcaaatttgaaatcaccttcctcctcccacagccctgtgtctggattgagtgaccagagtttcactgtggatatgtgctctggcatcttgacctgggtcgagtcaaggtggaccttcactttgccagcattaagtggctctgaggtgacctcatctctgaagtccacagagaacatgccatacgtccgaagggggaaagtgtctccttcgtcattgatgaagttcaggtcagtctgggcagctgtggctgtggaaatattccggggatccaggaaggtcacactggccttcacttttcctatgtagggctccccattctgcctgtagaaactcctggatggaatctccagttcagccatggggtcttcaccaaccacttcccccagggggatgatgttggtctccatggcttccaaagtgatgggctttttccgacgaagcatcttgatttcatggaacacggcactccccttcttgttgaaaggtagcactttggtggtgttgacaaacttctgcagcctgtccacaaatgtgagcaccagcctctcagtgtcctgggggacatggagggtgaaagtgcccttgtagccagtcatgcttacacggctgttccccatgtacacatggccaaagcgcatgggctccccattgtcagcagcactgacacggccccgcacgatgctccgagtttccgtacaccgctggcagctgcactccttggccaccttggtgggtagcgtgtagccactgcactggatctccctttcctctgtcttggagatgccacagcagttctgcacagcatcacggcacctgatcccattatcctgctgccctgcacaagtcttaacagggcagcgtccca

SEQ ID NO: 2215 - DNA, 24 bp, Homo sapiens
gcggagacgcggcgcgctgcacag

SEQ ID NO: 2216 - DNA, 156 bp, Homo sapiens
tttatggcgtcgtacaccagagcctgcagcaacagcgtctgcccagttccagcagggggcagcagggcccgggtcagagccggccgggggcctgcctggggcagctcacagcctgcccaggaaccagcccagctcagcccgcttggttgagcccag

SEQ ID NO: 2217 - DNA, 24 bp, Homo sapiens
tgttccggcgcatggtctttgcat

SEQ ID NO: 2218 - DNA, 40 bp, Homo sapiens
cgaggatcactgaacgtgatccagtgcttcacacggtccc

SEQ ID NO: 2219 - DNA, 71 bp, Homo sapiens
gtgaagccctccaatatgctagtaaacacaagaggacaggttaagctgtgtgattttggagttagcactca

SEQ ID NO: 2220 - DNA, 24 bp, Homo sapiens
gaggatggggatgattacgaattc

SEQ ID NO: 2221 - DNA, 135 bp, Homo sapiens
acaaccgttgctgggtgtcccagggcctgaggcaggacggtactccgctgacaccttccctttcggccttgaggttcccagcctggtggccccaggacgttccggtcgcatggcagagtgctacggacgacgcct

SEQ ID NO: 2222 - DNA, 24 bp, Homo sapiens
ggcttggtgtggtgcagcacctcc

SEQ ID NO: 2223 - DNA, 47 bp, Homo sapiens
gtgcagacatggtcggacacagggcacacccagatgttcccatgctt

SEQ ID NO: 2224 - DNA, 120 bp, Homo sapiens
gtccagcgccacggtctcgaaggcccttcgcatcatggggtactcctccagcacctcattgaagttgtccacgctcagcgagtagaggcggcagtaggtgtcggccctcacgctggctgt

SEQ ID NO: 2225 - DNA, 142 bp, Homo sapiens
ctcaggcggattctccggcgcggcccgccccgcccctcggactccccgggccgcccccggcccccattcgggccgggcctcgctgcggcggcgactgagccaggctgggccgcgtccctgagtcccagagtcggcgcggcgc

SEQ ID NO: 2226 - DNA, 39 bp, Homo sapiens
tggagcccatggagaccgccgagccacagtcctcgccag

SEQ ID NO: 2227 - DNA, 26 bp, Homo sapiens
gcaaagcggaacaggtcatcactgat

SEQ ID NO: 2228 - DNA, 62 bp, Homo sapiens
gagtctgggcggttcggcgaggcccccagcatgccttttctccgcagaacggccttggccag

SEQ ID NO: 2229 - DNA, 156 bp, Homo sapiens
cctgtgatgtatggcaagctgccccgcttagagacagactccgggctcgagcacagcctgccccactctgttggtaaccaggatccctgcacctacaaggggtcctacttctcctgccccatggcaggtactcctaaggccgagtctgagcagttg

SEQ ID NO: 2230 - DNA, 180 bp, Homo sapiens
cctgctgaccaactgcctgttctaccgctcgccagcagaaggccctgagaagatgcaggactccagccctgttgagctcctgcccttcagtccccaggctcactcctacccaggcccaccactggcagcacccaaacctgtctaccgcaaccctctgtgctatgggctctcaacttgtct

SEQ ID NO: 2231 - DNA, 24 bp, Homo sapiens
ctgagggtctgactgctgagtggc

SEQ ID NO: 2232 - DNA, 26 bp, Homo sapiens
gcatcaagtgcgccaagtgccaggtg

SEQ ID NO: 2233 - DNA, 30 bp, Homo sapiens
ggagctgcactacccgctgggcgagcgccg

SEQ ID NO: 2234 - DNA, 129 bp, Homo sapiens
agcagccaattagcccaatgatgaaaagcagggctcctacagctatgatcactacagcagggatgagcgtgtacacatcttcaaagaagtggtcatagtcatcataagtgatgaagacataggctccca

SEQ ID NO: 2235 - DNA, 59 bp, Homo sapiens
gtggagacatgatgaaaggtcgtttcccaacgggctcacagtcattgccgcttccgtca

SEQ ID NO: 2236 - DNA, 92 bp, Homo sapiens
tacctgggagtgttagacctcagcccagtactttgcccacttgtggatgcccagtggccagcccacgggtcttcctgccctagccccaatcc

SEQ ID NO: 2237 - DNA, 53 bp, Homo sapiens
agtggacaaagtagcgggcagttccaagggcggccctcggaagtctggtcgca

SEQ ID NO: 2238 - DNA, 94 bp, Homo sapiens
ggcgtcagtgactgcacagccacagcttaccccaagttcaccgagagggctgtcgtagacgtgccgatgcccaagaagctctttggttctcagc

SEQ ID NO: 2239 - DNA, 87 bp, Homo sapiens
aatggagagggttaaaaacatgcaaactgccactttcaacctttgccagtattccctctacccccgtgagagctatctggggggaag

SEQ ID NO: 2240 - DNA, 297 bp, Homo sapiens
caatgacctcacagcggtaacgcccatagtcctccagccgcagatcctggatctccagcgagacgtcatgctctttgtcctgccgcaggtgcacgcggccttggtagtccccaaaggagcggtgcctcagcccgatggccaccagcacgtccttctctggggccccgttctccgacagcttccaccatttgacacgcacacgccgcggggagaccagggccggctcgtagcggtagcggcagggcaggatcacactggccccttggtaggtgaacagggtctcctcgggtgtctcca

SEQ ID NO: 2241 - DNA, 31 bp, Homo sapiens
tggatgtccaatgggttgtgccgcagctgcc

SEQ ID NO: 2242 - DNA, 169 bp, Homo sapiens
gctctgggccgcagcgaccctcctgcggaactcctggagccgagaccgctcgccagcatcctggagctccttgccctcgagctcccgcagctgcctctggccttcactcagctcggcccgcacctgctctgcctcctgctccagctcccggatacgctggctgtgctgg

SEQ ID NO: 2243 - DNA, 25 bp, Homo sapiens
agctgcagtctggagtggatgctgc

SEQ ID NO: 2244 - DNA, 29 bp, Homo sapiens
tggacaccaccgaccaccactttggcagt

SEQ ID NO: 2245 - DNA, 88 bp, Homo sapiens
ggcggagaccgcactcatcttacaccgcaagggttttgactgcggcctggaggccaagaacttgggcttcaactgcaccacaagccaa

SEQ ID NO: 2246 - DNA, 53 bp, Homo sapiens
tctgcccaggaaccggagggctgagatctcagagaatgtacaaccacccaaga

SEQ ID NO: 2247 - DNA, 32 bp, Homo sapiens
acggggccagccttcgcgtccgagctcagggg

SEQ ID NO: 2248 - DNA, 87 bp, Homo sapiens
tgtctgccccacactcggtgccatccaggggagggtccagcttggtcttgcaggatgtgtctccttctaccaggcaccacagtccag

SEQ ID NO: 2249 - DNA, 154 bp, Homo sapiens
acacgggcggcaagccgtccacgcggggcggtgaccctgcagcgcggtcccgcaggacggaaggcatccgcgccgcgtacaggcggggagaccgcggcggcgcccgggacctgctggaggaggcctgcgaccagtgcgcgtcccagctggaaaa

SEQ ID NO: 2250 - DNA, 134 bp, Homo sapiens
tatcccgctgctgcacggtgtctgcccacagcagggacccaacaaatatgcatccagtgaacaaagggacgaaggcccctcagcagctctgtaaatgggctcctgtccacagtggggtgatgcaacatgccctc

SEQ ID NO: 2251 - DNA, 60 bp, Homo sapiens
ttagagccagagccgtagaccacttatagcctccagtccaattgcaatatagcattttgg

SEQ ID NO: 2252 - DNA, 62 bp, Homo sapiens
aagtcaactcccaaatagccctagaatacggccaggcaatgacggtccgagtgtgcaagatg

SEQ ID NO: 2253 - DNA, 104 bp, Homo sapiens
tagcctagccctcccgagcctccctgggggtccactgtccgccagcctgccgaccgcagaccaccgctcagccttcttcttctggggcctccacgagctgggga

SEQ ID NO: 2254 - DNA, 75 bp, Homo sapiens
gggcgtctcgtctggccggagcatgaggctacgggggtcgcgcagcgggtagatgtagccatgctgcaccaggac

SEQ ID NO: 2255 - DNA, 78 bp, Homo sapiens
cagtgaggcggagctgtccccagagaccctatgcaacgggcagctgggctgcagtgaccccgctttcctcacgcccag

SEQ ID NO: 2256 - DNA, 25 bp, Homo sapiens
cctggctcagcccgactgccctcct

SEQ ID NO: 2257 - DNA, 96 bp, Homo sapiens
gcgggcagggcagtgtgcggctctggcggctgcgtggcggggtgctgcgttcctgccccgtggacttaggggagcaccacgcgctgcagttcaccg

SEQ ID NO: 2258 - DNA, 63 bp, Homo sapiens
acagatggtctgctggccacatcgctggacgccacctgtgacgttgcctgcttgatgtttgat

SEQ ID NO: 2259 - DNA, 34 bp, Homo sapiens
ctcaagtttggagccgtttccgtggttgtagcag

SEQ ID NO: 2260 - DNA, 36 bp, Homo sapiens
ctcctgatgctccagcgcccacttcacttccccctg

SEQ ID NO: 2261 - DNA, 24 bp, Homo sapiens
ctgcggccacgagcacacgcttag

SEQ ID NO: 2262 - DNA, 65 bp, Homo sapiens
tgagacggcccgatgaagtcatccaggtccgtcagctgcagcgccccgctgaagggcgacgccat

SEQ ID NO: 2263 - DNA, 41 bp, Homo sapiens
ctgcgcccctggacggagtcctggccaacccacctaacatt

SEQ ID NO: 2264 - DNA, 93 bp, Homo sapiens
accccgagtctgtgatccagcacctgggctacctcttcctcaagatgagccctgaggacattcgcaagtggaatgtgacgtccctggagaccc

SEQ ID NO: 2265 - DNA, 257 bp, Homo sapiens
ggggaacgtgagtccctgctgtctggcgagggcaagggcagcaccgacgacgaagctgaggacggcagggccgcgcccgggccccgtgccaccccactgcggcgggccgagtccctggacccacggcccctgcggccggccgccctcccgcctaccaagtgccgcgatcgcgacgggcaggtggtggccctgcccagcgacttcttcctgcgcatcgacagccaccgtgaggatgcagccgagcttgacgacgactc

SEQ ID NO: 2266 - DNA, 102 bp, Homo sapiens
gttgcgccgcctgtcccggctattgtggtagtgtgggcacgcatagccctggcggcacaggcgtggcggcttcgggcactgctccgtcttgtagctgcccag

SEQ ID NO: 2267 - DNA, 63 bp, Homo sapiens
gtgtgattgatccgccgctcctcctccaggaacagctggttctcactgttgtcatagtccaag

SEQ ID NO: 2268 - DNA, 24 bp, Homo sapiens
tgctccgcaccgatgcaggagaag

SEQ ID NO: 2269 - DNA, 191 bp, Homo sapiens
ccagcccagcttgttgtgtagcacctgcttgaggcccggcggcagcggcagaccctccagcgtgtctcccgagtctggccgcagctggcgcaggcggtggcagcacaggtactggagggaagtggcgctggcacaggagcgggtgaccttcatgctgctccgggccgccgtggagcacaccatcgggtaga

SEQ ID NO: 2270 - DNA, 37 bp, Homo sapiens
tgcccatcagagtcgtagccccagttagtggagcctg

SEQ ID NO: 2271 - DNA, 29 bp, Homo sapiens
tacatgtagttgtcggtcagggcaggcag

SEQ ID NO: 2272 - DNA, 306 bp, Homo sapiens
ggactgcaaaacaccggcgtcggcgcgtcgcagccaatcagcgcccgcctcgcgctgccctcagccaatcagcgtccacctcgcaccgtccgccaaccaatcaacgcgctcgcgctcaacttgttttgtccgcgagccccgactgccacgggccgggagacgggcctgggagcggcggcggcggcccgagagctgcgccgggagagctgtgccgcgagcctccgcctcttttttggcaccgcacagtggatccctggaggccgagcgccacgccgcccgggtacccggcagatcgcgaggtggaac

SEQ ID NO: 2273 - DNA, 482 bp, Homo sapiens
tttgccgaccctgcaacttgatggatctgctggcaccaaccagattgataaactggctcatctgatcttgtggccaccacccaggagctgactcagcgcaagaagacagctgactccctgtgatttcctccctgaccaatcggctctcctggctcactggctctccccacccgccaagttatccttaaaaactctgctccccggcactccagcagcctgggcgacaagatcaagactctctcaaaaaaaaaaaaaaaaaaaacctctgctccgcaaatgctcaaagagatcgatttgagtaataataaaacataaaactccggtctcccgcacagccagctctgtgtgaattactctttctctattgcaattcccctgtcttaatgaatcggctttgtctaggcagcaggcaaggtgaaccccttgggcggttacacagcgctctgagacctcgcaggaagagtcgcctccggcctttgtta

SEQ ID NO: 2274 - DNA, 33 bp, Homo sapiens
cctggatgtgttccggaaggggtggctctttgc

SEQ ID NO: 2275 - DNA, 91 bp, Homo sapiens
acaacatgatctgcacgcagaccctgctgcgtcaccagggcagtgtcaccgcgctggctgtgtcccggggccgactcttctcaggggctgt

SEQ ID NO: 2276 - DNA, 25 bp, Homo sapiens
ggcggggccctcatccaggaggtac

SEQ ID NO: 2277 - DNA, 30 bp, Homo sapiens
gtcccccgggccggactcagagacggactt

SEQ ID NO: 2278 - DNA, 46 bp, Homo sapiens
gcgcggagcagaacgcgcgccgggactcgcacagaagccaccagcg

SEQ ID NO: 2279 - DNA, 56 bp, Homo sapiens
gctctctgccagcccgcacagcagtggaaggcaggcagggctgaataaagggtctg

SEQ ID NO: 2280 - DNA, 26 bp, Homo sapiens
gtgtgggaggttgattgtaaagaaaa

SEQ ID NO: 2281 - DNA, 27 bp, Homo sapiens
gtgtctgcgccgagaaggacttggaga

SEQ ID NO: 2282 - DNA, 26 bp, Homo sapiens
ctgacccaggctaggttgattttttc

SEQ ID NO: 2283 - DNA, 849 bp, Homo sapiens
aattttcccagataggctagccagaaaaaacttcaagtcctctgtaacatctgaggtgaccaagaggcagaagagcagagcagtcgggggccgtgtcctggctgatcccaactgcagctctgctgtgggggcccgtgggagggaggcagacccctgggctttcctgctggccacggagactctgctcctgcatggaaagggagcctgggagccagcagcccacgcctggggagcctgcctggggccatgtgaccatggcctctccctgggaacgggctgaccacaacacaccctgctgccatccacttctgtttactctgcaaatgtaagaaagaaccacttggccagaagtgtcccccagatgcttttttttttttttttttggagacagttttgctcttgtctccccggctggagtgcagtggcatgatctcaactctcaactcactgtaacctccgcctcccggatactcctgcctcagcctcctgggtagctgggattacaagcacccaaccacgcccagctaatttttgtattttcggtagagacgggatttcaccatgttggccaggctagtctcgaactcatgacctcaagtgatccgcccacttcggtctcccaaagtgctgggattacaggcatgagccacggcgcctggcccccaaatgctcttgaaccggaaacccagggatgggagatgctcactgagctgctgcttttatgtgtgctggtgctatgtgtgttcatgtccgcggcagctgtctttttgctactataagggaattctggccaccctgggtggggtgtggtcggggtgagaacccaagcgttggaactgtagacccgtc

SEQ ID NO: 2284 - DNA, 25 bp, Homo sapiens
tgttgctgccttggccctctgagac

SEQ ID NO: 2285 - DNA, 25 bp, Homo sapiens
tccccttcccctgctaagcctggcc

SEQ ID NO: 2286 - DNA, 87 bp, Homo sapiens
actgcacggcgcgggcgataccgttgcaggggttgcatgccacggtgccctcggcgcccggggcccggcacgaggtctaaacatcgc

SEQ ID NO: 2287 - DNA, 26 bp, Homo sapiens
aggtatcctggccgcattgaggatgg

SEQ ID NO: 2288 - DNA, 76 bp, Homo sapiens
cctggagcgcggacctggacaagtgcatggactgcgcgtcttgcagggcgcgaccgcacagcgacttctgcctggg

SEQ ID NO: 2289 - DNA, 121 bp, Homo sapiens
catgagtgcggagacagcttctctcacagctccaatcggattcgccacctgagaacgcatacgggagagagaccctataaatgttctgaatgtggagaaagcttctctcggagttcccgtc

SEQ ID NO: 2290 - DNA, 36 bp, Homo sapiens
gggccttggcacctccatcaccaatactattactgg

SEQ ID NO: 2291 - DNA, 38 bp, Homo sapiens
ccaggccaggctcgcttgcgcgcagctgattcagcttc

SEQ ID NO: 2292 - DNA, 143 bp, Homo sapiens
gggttgatctccagcgtgggctgcaggagctgtgcgcgctcctcctgggtcttggccagctgctgcatgcgcaggaagtggcgggcagcccccatctccagcacggtgaccatggcagggtgggtgtccagtcggagggtcac

SEQ ID NO: 2293 - DNA, 57 bp, Homo sapiens
ggtgagacgtggtgtggcgaaggctggggctgtatccgtggtgacgggctggaatgt

SEQ ID NO: 2294 - DNA, 24 bp, Homo sapiens
ctgtgccgttactgctactctctt

SEQ ID NO: 2295 - DNA, 731 bp, Homo sapiens
aagcaggcttcatcccggaaatggtagccaaaggtctcgaaaaggacagagtaggccacccccagacacaaactcaggtacaaaggtaagtgcatgacggtatagagcaaaaagagcacttcgatgcacatggagaagctccccacttgagataagcaagtatctgtgggccgggctgtggccgtaaggttggagctgtcgccgcgtcctgagacaggcgtcaagacctggaactgcgcagccagggtcagggcgaacaccagcagggtgagagccagcgaggtccacgcgtaatgccgggcgtacagcttggtgaaggtaaacagaaagaagcccacacacaccaggaggaagcacagcgcgggggcgaccatgacgatcagtctggatctcatgtggaccgcaaaatagatgctccacagaaggcaggcgaagccgatgtagaagagcgcataccggaaccggcgctgggtctgcgggaagcagcgctccaggcaggcctcctccaggttcaccgagtcgaacttggggtcccaccagcggctggaggccctctcgaacagctggggcagcttcttctgcctgcgcagccggcctccgccgcccactcgccgggggacgcccccggagtccccagagctgctgcagctagaggagatgctgtatttgcagtgcttggggtggctgttggaggacagctgcttggggttgatcttgacgcgcacgctgtt

SEQ ID NO: 2296 - DNA, 226 bp, Homo sapiens
ggctccgggaccgctttgctcgctcgccttccgcgcctctcgccccgagggtggcctccgcgccgcgcggcttctcctcctcgcgcgctcgcctcctccagctgcggctccggagggaagttcagaccttgagcgctcccagccccgcgagccgcctgcgcacaaacaactccgctggcggcgcggagccctccatcctgcaggagccgcgctccgatgcgtcaaa

SEQ ID NO: 2297 - DNA, 55 bp, Homo sapiens
ccagggcgctggagaagaaccgcgtgtcccacagcttcacttcgcgctcacgcat

SEQ ID NO: 2298 - DNA, 561 bp, Homo sapiens
tcttgcagggctaaaactctaatttggaattgaatattgtggatatcttagttaaaggccatgcttacagcttagaaatgaagccttaagctgcatcaagttacgaagtgattaatttccttctcagcaaacctccgggaggttccagaatgagttcttcctgacaggttgtcttcactgggagcgtggggcccccaggccccaccagcaccgtcctcccctaatgaggggccctgccgaggcatcagctgctctgctcagttagtttttattcccggggtaccaagcagctgcacagtcggtgcctgggaggcacgtagaggcccagagagtccctgggggttctgctctgaccgtgtgggtggtgatccttgtcaggatgtacagtccttgctcccaccccatccgggatggccgcctgtccctgactattgagtcctgttgttgtaagccaggcatggagggctcctgcccttctgctgagccacagcccattgcagcactgtgctggccagacttcagctgccttgggaactgaagccctgccactgttgctagtca

SEQ ID NO: 2299 - DNA, 96 bp, Homo sapiens
gcctgggcgggacaagttccaggagcccgggaccccgattctgcggccgagtccactgcagaggcggggatggagctgcgcgctaggcgccaactc

SEQ ID NO: 2300 - DNA, 281 bp, Homo sapiens
ggctccgagcatgaggtccgcctcctgggcgagacccagcagtggacagcatggtcctcacacccagctccctgcacacccaggccagccacccctcccgctcgtgcacaggcacgcagatgcgctcacacgtacacacacacaaatgcacgcccacttgcacatgctcacgcacatgttcacacatgcacactcacgctcacacatgctgtcacgcatacacacacgcacatactcctgcacatgttcccatgcatgtgtgtgcactcggaccgagcatc

SEQ ID NO: 2301 - DNA, 41 bp, Homo sapiens
cagaagggtctgtagctccagtagctggagaacacggagat

SEQ ID NO: 2302 - DNA, 48 bp, Homo sapiens
agggtgttcaaggcgggacacaccaggctagagatccgcgatcgggcc

SEQ ID NO: 2303 - DNA, 26 bp, Homo sapiens
gttggacccggtccatccggcatcac

SEQ ID NO: 2304 - DNA, 60 bp, Homo sapiens
aggactttctctctgggtccccttccaaaacgcagccaccgccgtcaccaatctctacaa

SEQ ID NO: 2305 - DNA, 745 bp, Homo sapiens
tgaccgcgttctgctcatcctagacggcttcgaggagctggaagcgcaagatggcttcctgcacagcacgtgcggaccggcaccggcggagccctgctccctccgggggctgctggccggccttttccagaagaagctgctccgaggttgcaccctcctcctcacagcccggccccggggccgcctggtccagagcctgagcaaggccgacgccctatttgagctgtccggcttctccatggagcaggcccaggcatacgtgatgcgctactttgagagctcagggatgacagagcaccaagacagagccctgacgctcctccgggaccggccacttcttctcagtcacagccacagccctactttgtgccgggcagtgtgccagctctcagaggccctgctggagcttggggaggacgccaagctgccctccacgctcacgggactctatgtcggcctgctgggccgtgcagccctcgacagcccccccggggccctggcagagctggccaagctggcctgggagctgggccgcagacatcaaagtaccctacaggaggaccagttcccatccgcagacgtgaggacctgggcgatggccaaaggcttagtccaacacccaccgcgggccgcagagtccgagctggccttccccagcttcctcctgcaatgcttcctgggggccctgtggctggctctgagtggcgaaatcaaggacaaggagctcccgcagtacctagcattg

SEQ ID NO: 2306 - DNA, 113 bp, Homo sapiens
tgctcccagtcgccggctttataccgccgccgccgcctcgggcccgaaggcccggcccggcccgttgctccccaatcccgcagctcgccgcacccgctaacccggacgctcca

SEQ ID NO: 2307 - DNA, 42 bp, Homo sapiens
ggacttgcaatgcgtcaagagagcgtccactgcctttctaac

SEQ ID NO: 2308 - DNA, 114 bp, Homo sapiens
gaactcctcgacggtctcggccgtgggggtgttgccaatgtcatggttgccgctgacaaggaccagtgggatggccctgtccactgccctaagcactcgcttcaggtcctccgt

SEQ ID NO: 2309 - DNA, 122 bp, Homo sapiens
cctcctcgctgaaacccatgattgccatggcctccacggtttcctggaacatctcatcatcctgggctgctgggatgggcacaaagccattggagaggaaggtgtagttgttgaagccctcc

SEQ ID NO: 2310 - DNA, 56 bp, Homo sapiens
ggccgtgtactccaacgctgacatttacctcttcgatgatcccctctcagcagtgg

SEQ ID NO: 2311 - DNA, 30 bp, Homo sapiens
tggcatgctggtgacggacagtgcagggaa

SEQ ID NO: 2312 - DNA, 162 bp, Homo sapiens
agtccatcacggagcgcaggcggtgggcaatgagcagcacagtgcactgtgcaaaccagctcccgagcatggcctgcatctgcagctccgtgccagggtccacggcagcagtagcctcgtccaggatgaggatctgggtcttccggagaagggcacgtgcca

SEQ ID NO: 2313 - DNA, 127 bp, Homo sapiens
actgcagggtcgtccgcccacaggctcagccagtagccccggcagaaggaggccacttgctggcagaggaagaggaagagtgcgtagaggcagaggggggtgcccacggcacgcaggtaggccaggt

SEQ ID NO: 2314 - DNA, 24 bp, Homo sapiens
ctcgagggggcagaaccgagtcac

SEQ ID NO: 2315 - DNA, 52 bp, Homo sapiens
aaatatcaatcattggcattctttgttactattggctcaacaccgtggccct

SEQ ID NO: 2316 - DNA, 44 bp, Homo sapiens
gacactgatggtggccggttggtagaccttcagcagatctttca

SEQ ID NO: 2317 - DNA, 24 bp, Homo sapiens
gcagaaccaaaggtcactctttcc

SEQ ID NO: 2318 - DNA, 29 bp, Homo sapiens
ctgcttccccggatgagcagaaggtgttt

SEQ ID NO: 2319 - DNA, 135 bp, Homo sapiens
gcaaagctgggtgccggtttctcctggtcacactttcccgggctccttctcccttggccagatgacttcagctcctccacttggctctggaggtgatcaatgttggtttgcaggcattcaatcgtttcagtcagg

SEQ ID NO: 2320 - DNA, 24 bp, Homo sapiens
gaagaactggagttgcttggctct

SEQ ID NO: 2321 - DNA, 26 bp, Homo sapiens
tgcggcagggagaggcatgaaccagc

SEQ ID NO: 2322 - DNA, 24 bp, Homo sapiens
tgagctggttcacagagccaccct

SEQ ID NO: 2323 - DNA, 58 bp, Homo sapiens
aaggtttggccacggaagcagcaagatgttagagagggctcggcacaccaacacctgg

SEQ ID NO: 2324 - DNA, 63 bp, Homo sapiens
gtgcggttcttacagaagctccggcatcccaacaccattcagtaccggggctgttacctgagg

SEQ ID NO: 2325 - DNA, 85 bp, Homo sapiens
atgagctcttcgttcttccctttgatctctacgctcatgggtgtccttggaaacctctggaacaggtcctccagacgaaccatgc

SEQ ID NO: 2326 - DNA, 32 bp, Homo sapiens
cacctctatggcagcaacgcctccctggccca

SEQ ID NO: 2327 - DNA, 80 bp, Homo sapiens
catctcacggctgcggcgcaagctggaaaagcagaggaaggtggaggtctacgcagatgccgacgaaatcctccaggagg

SEQ ID NO: 2328 - DNA, 105 bp, Homo sapiens
cagcgctcacagcgatcctggcgcctggcctgtgagtctgcctcctccaccgaagtgtctggggccttgaagagcaccagctgcagcataaaccaccccatcttc

SEQ ID NO: 2329 - DNA, 65 bp, Homo sapiens
tctcgagtacgtgccacaccaaggagcgcttgccctctcactccgactttctggctgagcttcgg

SEQ ID NO: 2330 - DNA, 43 bp, Homo sapiens
ttaaatgacattgcatcgaagccctcccaggaacacatattta

SEQ ID NO: 2331 - DNA, 37 bp, Homo sapiens
actgagcgggggtcaagacctcacccaggatggactg

SEQ ID NO: 2332 - DNA, 25 bp, Homo sapiens
tgcggaaggaaagatttcagatccc

SEQ ID NO: 2333 - DNA, 29 bp, Homo sapiens
tcccagcctgacaagctttccactcacag

SEQ ID NO: 2334 - DNA, 137 bp, Homo sapiens
ctgcgcggactcatgctggcggtcatgctggccgcgctcatgtcctcgctggcctccatcttcaacagcagcagcacgctcttcaccatggacatctacacgcgcctgcggccacgcgccggcgaccgcgagctgct

SEQ ID NO: 2335 - DNA, 85 bp, Homo sapiens
tggagtccatgaacccgcaggtgaaggcggtggagtacgccgtgcggggacccatcgtgctcaaggccggcgagatcgagctcga

SEQ ID NO: 2336 - DNA, 32 bp, Homo sapiens
ggcagaagttccaggtcccgattcagggagca

SEQ ID NO: 2337 - DNA, 55 bp, Homo sapiens
agcgggacccctacctcaaggagatgaacatccgcacctacctggtcatcgaccc

SEQ ID NO: 2338 - DNA, 62 bp, Homo sapiens
tcggcacagcaccggccacagacgtgggcatccttgctcttagtagggcgactcggttgacc

SEQ ID NO: 2339 - DNA, 30 bp, Homo sapiens
gcgcttcgccgtttgaatggctgcgggccc

SEQ ID NO: 2340 - DNA, 81 bp, Homo sapiens
aagggcgccggattgccttcatcctgtacctggttcctccctgggacaggagcatgggtggtaccctggacctgtacagca

SEQ ID NO: 2341 - DNA, 52 bp, Homo sapiens
ttgtctcaggttaacctctgtgaggacgatgatgccagttccctgctgctgc

SEQ ID NO: 2342 - DNA, 33 bp, Homo sapiens
ggtgacttccaagagtgactccgtcggaggaaa

SEQ ID NO: 2343 - DNA, 945 bp, Homo sapiens
gagggtctggcacatccttaatcctgtgcccctgcctgggacagaaatgtggctccagttgctctgtctctcgtggtcaccctgagggcactctgcatcctctgtcattttaacctcaggtggcacccagggcgaatggggcccagggcagaccttcagggccagagccctggcggaggagaggccctttgccaggagcacagcagcagctcgcctacctctgagcccaggccccctccctccctcagccccccagtcctccctccatcttccctggggttctcctcctctcccagggcctccttgctccttcgttcacagctgggggtccccgattccaatgctgttttttggggagtggtttccaggagctgcctggtgtctgctgtaaatgtttgtctactgcacaagcctcggcctgcccctgagccaggctcggtaccgatgcgtgggctgggctaggtccctctgtccatctgggcctttgtatgagctgcattgcccttgctcaccctgaccaagcacacgcctcagaggggccctcagcctctcctgaagccctcttgtggcaagaactgtggaccatgccagtcccgtctggtttccatcccaccactccaaggactgagactgacctcctctggtgacactggcctagggcctgacactctcctaagaggttctctccaagcccccaaatagctccaggcgccctcggccgcccatcatggttaattctgtccaacaaacacacacgggtagattgctggcctgttgtaggtggtagggacacagatgaccgacctggtcactcctcctgccaacattcagtctggtatgtgaggcgtgcgtgaagcaagaactcctggagctacagggacagggagccatcattcctgcctgggaatcctggaagacttcctgcaggagtcagcgttcaatctt

SEQ ID NO: 2344 - DNA, 77 bp, Homo sapiens
gacatgggggttggccatcttcaccccgttgggcctctccaccgtctacatctttgcacttttcaactccttgcaag

SEQ ID NO: 2345 - DNA, 75 bp, Homo sapiens
gcagcagtgggaagccgcgcacctgccgcttgagcccattgtagtcgttggtgagggtccgcagtgccggctgca

SEQ ID NO: 2346 - DNA, 115 bp, Homo sapiens
agtgccaggtgtactcgtaccaggtcttgacgcggttctgcacggacttggggatcttgtagaaattcatgtacttcaccgtgctgtccatgcagctgcggtagtaggtctgtcc

SEQ ID NO: 2347 - DNA, 115 bp, Homo sapiens
cagaggtgacgtcagggtcaatgagtttctccttcactttctctgtccgctccttgaagagcttcaccagctcctggagccggtcgttgatgatggcgctatttgtgctggccgt

SEQ ID NO: 2348 - DNA, 142 bp, Homo sapiens
actggctgcggctttatggctacctgcctcagcccagccgccatatgtccaccatgcgttccgcccagatcttggcctcggcccttgcagagatgcagcgcttctacgggatcccagtcaccggtgtgctcgacgaagagac

SEQ ID NO: 2349 - DNA, 54 bp, Homo sapiens
aaatattacgctaaactggagcccagggatcagcgacctccacgattatcagaa

SEQ ID NO: 2350 - DNA, 35 bp, Homo sapiens
tccccagagagacccgccgcggacaccatgggcag

SEQ ID NO: 2351 - DNA, 80 bp, Homo sapiens
aatggtcctcagagttcgtccatgaactgttcctgctcaaggagaaatgaactcaggctggcctgacacagtagagttca

SEQ ID NO: 2352 - DNA, 26 bp, Homo sapiens
tggcgacccaggcgaagcgtccacgg

SEQ ID NO: 2353 - DNA, 98 bp, Homo sapiens
agggtaggaggtgagcacgctcaggatgatgaaggctcgggcaacggccacggccatgtcctccgagggataggacaggagcacgtcaggatccacag

SEQ ID NO: 2354 - DNA, 79 bp, Homo sapiens
cggcgccctagcagatgcacgtgtctgtcgaatcgctgcctccgagcccacccccgagctcgcatgctgtcacccattc

SEQ ID NO: 2355 - DNA, 76 bp, Homo sapiens
acagtcgccttcaggggcacgctgtctgctggttgatccgggtccttcttccttgacatggtccagtgggtgaaaa

SEQ ID NO: 2356 - DNA, 49 bp, Homo sapiens
cctggaggtagtgcccgaacgctctctggggaacgagcaatgggaattc

SEQ ID NO: 2357 - DNA, 35 bp, Homo sapiens
tgtgcttgcggagccgtccggcggctgggatcgag

SEQ ID NO: 2358 - DNA, 126 bp, Homo sapiens
gggcccaacaacactggacacccggccactgcagtcttctgccctgctggacagcagcagcagcagcagcagcagcagcagcagcagcagcaacagtaacagcagcagttcgtccggacccaaccc

SEQ ID NO: 2359 - DNA, 87 bp, Homo sapiens
ccgcgaggacaagcacgagtgcccctttgcccggggcagcatccagctgacggtgctgctgtgtgagctgctccgtgttggggagcc

SEQ ID NO: 2360 - DNA, 113 bp, Homo sapiens
acagcccaggacttctcacccatgttcttcggccaagaccagagcttccacgagctcttctgtgtgggcatccagctgttgaataagacctggaaggagatgcgggctacaca

SEQ ID NO: 2361 - DNA, 71 bp, Homo sapiens
gttgcccaccgctaggagggtagccaggatgcagcggaaggtggcattctgtaccagctgttccataccca

SEQ ID NO: 2362 - DNA, 180 bp, Homo sapiens
ggaacaaggatcccaaagccgatcacagcaaagaagaggtacagcagccaggccacaatctggagcgggtgagggggccagctccacccattccggcgggatcgctggccctgcagctcaggggagggtccgctgggctgtgccggtgccgtccacacactcttctcaggggccgtcttg

SEQ ID NO: 2363 - DNA, 36 bp, Homo sapiens
tggacctggtgtacacggcgctgaagcggggcctga

SEQ ID NO: 2364 - DNA, 78 bp, Homo sapiens
cggccgcctgtagttgtcaggacagagcgtcgggtctggggggatgggccccgagatgcgggacgggccctcgcacat

SEQ ID NO: 2365 - DNA, 25 bp, Homo sapiens
tgcaggcaccaaagagaaccacact

SEQ ID NO: 2366 - DNA, 28 bp, Homo sapiens
ttccgccccggtgctaattattcttagg

SEQ ID NO: 2367 - DNA, 63 bp, Homo sapiens
tccacaagaactcaactggcaaggctgcttttctgtgctaaaactggggagctagtgggcacc

SEQ ID NO: 2368 - DNA, 26 bp, Homo sapiens
cccacagagccaccgtctatgcacag

SEQ ID NO: 2369 - DNA, 32 bp, Homo sapiens
cccgctgtgggagtacccatgccgcagcctct

SEQ ID NO: 2370 - DNA, 67 bp, Homo sapiens
agagccacgcagcggtgctatggatggagtaccacctgaccccggagtgcacgctcagcactggcct

SEQ ID NO: 2371 - DNA, 49 bp, Homo sapiens
ccgaagacaccatcagtcgcatggctactggcaggtggtccgtcaggcc

SEQ ID NO: 2372 - DNA, 327 bp, Homo sapiens
aaggacagcccaaagtacatgcactggcccagcagagagtccaggtggccgcctatgccccggtaaaggtcggtctccagcacctgcaggaattgtgagaccttctgtagcacccagccatggaagatggcactctcattcacagtgtgctcacccatggcagggggcagcagtgggtcctcgtctgagaagatggcacggtactgggtgatgatatcaaagagatggacacgggaggcctcgatggtttttgtaatatggaaatagggatcatcattaggaatggcagtcaggatggaccggagccaagcatctcgggcctgaaga

SEQ ID NO: 2373 - DNA, 135 bp, Homo sapiens
tggcattagagaagctcggtgctgtcttcaatcaagtagccttcccactgcagtacacacccaggaaatttgtcatccaccctgagagtaacaaccttattatcattgaaacggaccacaatgcctacactgagg

SEQ ID NO: 2374 - DNA, 25 bp, Homo sapiens
gcttgaagccgcccgcactctccat

SEQ ID NO: 2375 - DNA, 33 bp, Homo sapiens
cccgaaacctcgaatgaaaccagcagctccggg

SEQ ID NO: 2376 - DNA, 56 bp, Homo sapiens
aagaacaagacctcagtggacgccgcggaggactacgcagaaggggtgcgcgtact

SEQ ID NO: 2377 - DNA, 25 bp, Homo sapiens
ttggtagttgtggagtagttacaca

SEQ ID NO: 2378 - DNA, 92 bp, Homo sapiens
acagagcgcccctgctccagggaggaggctcaccggaccctggggcagagctgagcttgggacaccagcgggaacagggcaccccttctgca

SEQ ID NO: 2379 - DNA, 1042 bp, Homo sapiens
actgcccatctggcgagtcctgggaggtgaacttagggggtgagggcaggggtcgtgactggatgctgctggtcttgtcagtggggttggggtgcagggtgccacccccctcaggccccggggcagtggccttggtccgtctgaagagcagtgaggcattgccgtgcaggaaggaggccagctgcttggcgtcctcgggcacagcccgcgagcaggccaccagccggtccaggtcctcaagggtggctccagagcctccccggccagcgtcgagggcctgaccatgtgccaccagcgtctggtgcacgtcctccatcttctgcagctgccggctaagcttggcatgcagggcacggtcagatgtgtgggcagcattgcccaccgcgctgcgggcaaactccaacagctcgtggacggcactctggacagcggccacagcagcctgcaggtcctgcaccagcggctcctgtggctcagaggggctacgccagctcccagtcgcaccggcgctgcctgccaggtccagaaggtgggcaacggtggcgctcacaccctgctgcagccgtgccagggcctccacagcaacttccagctccaggggttcccggcccggccctgccacctccaaggaggacgcagactggctgctgcgtgtgctgccggtgctggaggccgacaggcgcttgccctctgccggggcttcacgttcagctgggggaggcaccgcatacacaccactgtcgaccacgccaccatcagccacctcaggaggaagcacccgttcacggggcacatcgtacagggtgcccgggccaggccgccgcaagccagggggcacgtcgtagaggtcaggagccgggggcggcacgtcatacacgtcctcggccggcggggagtctggagggggcgcagccagtaccagtggggtgcgggccgggtcaaagggcttggccttggcgaaggcggggggcacatcgtaggtctcctcacgcagcagtgggccatcgggcacatccttgctcaccgatggaggaacgtcgta

SEQ ID NO: 2380 - DNA, 81 bp, Homo sapiens
cctgggctgaagtgatccacccacctcagcctcccaaagtgctgggattacaggtgtgagcccccacacccggcctgcatt

SEQ ID NO: 2381 - DNA, 213 bp, Homo sapiens
agaccagcgtctcatttgtgggccctggcgcgtacagacgttccgggcggttgaaagagcgctggtattcaaacgtggtcccagcgaaggggaactccccaggccagtcgatgctccagcccccggtgaggtaatacttttgactgaggcttcgaactgcgaggtaactggaggaaacctgcagctcctggatttcgatgcttcgggcgccag

SEQ ID NO: 2382 - DNA, 79 bp, Homo sapiens
gatgccatctccttgacccgcagcatgacctcctggctgaacgtggtgggccagaagacctgcgacaccagccccctgc

SEQ ID NO: 2383 - DNA, 26 bp, Homo sapiens
tgctctgttggggtgttgtccaaata

SEQ ID NO: 2384 - DNA, 24 bp, Homo sapiens
tgatttctcccgattccttccttc

SEQ ID NO: 2385 - DNA, 110 bp, Homo sapiens
ctggctggcgaggcagagcctctcctcaaagcctggctcccacggaaaatatgctcagtgcagccgcgtgcatgaatgaaaacgccgccgggcgcttctagtcggacaaa

SEQ ID NO: 2386 - DNA, 171 bp, Homo sapiens
gccggcgcgcacaggctgctccgggagccgccgcagcagggccgggcgctgggcgggctgctgcgctgggtgggcgccaggatgggcgagccccgggagtcgctggcccccgccgcccccgcggaccccggcccagcctcgccgcgcgggggcaccgccgtcatcctggac

SEQ ID NO: 2387 - DNA, 135 bp, Homo sapiens
gcccacaatcacctggagaccgtggaggacattcagcatctacaagagtgtttgaggctttgtgtccttgacctttcgcacaacaagctgagtgacccggagatcctgagcattctggaaagcatgcccgatttg

SEQ ID NO: 2388 - DNA, 32 bp, Homo sapiens
tgcctcagtacgtcctccctgtgcagcttggc

SEQ ID NO: 2389 - DNA, 28 bp, Homo sapiens
aggagtatgaggacgccgtcagcatcgc

SEQ ID NO: 2390 - DNA, 121 bp, Homo sapiens
gtcaggggcgatcgtggccatgactggggatggggtgaacgacgcagtggccctgaagtctgcagacattgggatcgccatggggcagacagggacggacgtcagcaaagaggccgccaac

SEQ ID NO: 2391 - DNA, 116 bp, Homo sapiens
agttctcctgagccgacagctgcgggctgttgtacgtggtgcacgtgggcttggctctgctgtgtcctttcccaaaatcaacatccacccaaagcccaaagtaattgtgctgcccc

SEQ ID NO: 2392 - DNA, 65 bp, Homo sapiens
atttggactgctacacgaccgttgctcagctgtgcccgtttgaaaagccagcaactcactgccca

SEQ ID NO: 2393 - DNA, 71 bp, Homo sapiens
acaaatgcccacaagggttgggtccagcccagttttcactgtgcaggcagatggtcggcagtcactggatt

SEQ ID NO: 2394 - DNA, 78 bp, Homo sapiens
tcagaaagggagcggctccaggcagaactggaccacttacgaaagtgccttgccttgcctgcaatgcactggcctagg

SEQ ID NO: 2395 - DNA, 33 bp, Homo sapiens
ctggaggttcgtgcggagtttgtacatgtggtt

SEQ ID NO: 2396 - DNA, 296 bp, Homo sapiens
aggagcccttgtcacatctcacagaaccatgagtcgggaaacagattttgggaaatgctgatcataggctagttggcctctgggtccagttgtcagcctttaccatgtggcccagccagctgcagcctcattcccggccaccagcccccactctccacagcgctccagcctccactctccaaagtgctcacacttccccagactccctaggctcctggggccccttcgtgcctttgcatatgctgctccccccgcctgggatgctctttcttcctctgcctgagtaacaagctcct

SEQ ID NO: 2397 - DNA, 73 bp, Homo sapiens
tgtcttcgtcgtcgaccccaccctcggcgccctcaacctcctcactgtcctcttccgagtccgtctcctccag

SEQ ID NO: 2398 - DNA, 55 bp, Homo sapiens
gcctcgcccctgcgcgctcgcccggccccgcggccgacggccccatcgacctgag

SEQ ID NO: 2399 - DNA, 39 bp, Homo sapiens
cacggtaccccacactgctactcggctgaggaactgccc

SEQ ID NO: 2400 - DNA, 26 bp, Homo sapiens
gcgcgggaggcgcgtgccaggcaggg

SEQ ID NO: 2401 - DNA, 124 bp, Homo sapiens
tgcgccagtaggcagggaagtcctggaactggaaggtgtagacggcgatgaggaccagcatggtgtaggccaccacgagccaccagaaggccttgagcagcttccgccacaggctgtagtagac

SEQ ID NO: 2402 - DNA, 559 bp, Homo sapiens
aaaccaggctgagccggggatcaggccacctccgcagggacccactgctgcctcttccaggagcccaggagacccagtgggtctcctgcccccgactccaactccctcctggcaggacacacccagctcacagtggcctttccatcctgggaaagggagtgagaggaggctcaggccagggacccgcccagctctggccggcaaccgcccttcagcctttcctgaaccactgtgtgggccccaacccatccgctgcctgccggagggagcccatggggaatggactattcttgccacccctatccatggcaggggaggggctcagcatggctcttgcccacccagaagaaggtgcagggggcctggcgtggtggttcacacctttgggaggccgaggtgggtggatcacctcaggtcaggagtttgagaccagcctggccaacatggtgaaaccctgtttctactgaaaatacaaaaattagccaggcgtggtgatgggcacctgtaatctcagctactcaggaggctgaggcaggagaatcactttcacttaaaccca

SEQ ID NO: 2403 - DNA, 124 bp, Homo sapiens
tctgctccccattggcgcccgcggtgaagggcagcttccgcttgctggctcgctccctcacctccttcccgccatcgccacgctccagttttggggtcttggttagagaaactttatctttatc

SEQ ID NO: 2404 - DNA, 223 bp, Homo sapiens
tcccgagtgagcatggaacacttcgagttcccagggttatagacagtcgttcccagtgtggctgaggccacccagaggcagcagagcattcagactccaaacagacccctgttcatgccgacgcttgcacgaccgccccagttcctgtggctccctcggaatgctaaggggatcggacatgaaaggaccctgtgagccgattgtcctatctccagcggccctg

SEQ ID NO: 2405 - DNA, 66 bp, Homo sapiens
tgtgggctgcatactggccgagctgctggcgcacaggcctcttctccccggcacttccgagatcca

SEQ ID NO: 2406 - DNA, 25 bp, Homo sapiens
tgggcacgcccagtgagaacatctg

SEQ ID NO: 2407 - DNA, 25 bp, Homo sapiens
gagcacacgtccacacatggtcctc

SEQ ID NO: 2408 - DNA, 24 bp, Homo sapiens
tttattggcgttgggccagcaagg

SEQ ID NO: 2409 - DNA, 281 bp, Homo sapiens
ggaccaaattgtgccctgggtagcctcagactttgggtattgataagccgatggatttgagtttttctaaagaatattcatattacctccttcttctaacttgccctatttgcaaaagcacttttgtagtaacaactattgggtcctgtcagacctccacggacagcaaagtggttttaatgcaagcccaaggatccttcttaaggtcttatctcaagagctctgggaggtggaagcatggggtgggatcggtggaccagggtggtaagtgtctgcacatc

SEQ ID NO: 2410 - DNA, 25 bp, Homo sapiens
gcactcgggggctgatctcatctgt

SEQ ID NO: 2411 - DNA, 32 bp, Homo sapiens
tcccgaacctgctggagttatcgttccggagg

SEQ ID NO: 2412 - DNA, 843 bp, Homo sapiens
aaagtaagtcagggagtcccagcagggactgtaaaagaacttgggaagctatacacatgcccacgatactgaccctgtcccggacctctctgcatgagaaggccagagcccagcacccctcctacagaggcactgctgcttctgttggggctgtgaccctggaattctgatggaagcagctggtctgaaggggcatggcacacactcaggtactacccctggagctgaacctttatcataagtccctctgagtgctagtcagtttggaggtgggtgaggaggaaagggggtacttaaaagaagccaacactgttgcccagcagcaacaccatccgtggggatggaacagaccagggacatcctcctttatgtttatgtgggctgcaattccagatccaggctgacctcagctcataatggatgcttttcaactggggcaacaggtggaggtgggaggagcccttgttagggctaaagtgatatgtgtgggtctcaagagccaaaggaaggagactaacagctgctgaccctcagaccacatagacaactgtctgcctagaatgtcagtttgtttctttcaagataacccgcatctggacttcccctagttgatgaatgaaggaacatctttaagcacaaatataatgaatagctaacacagagcttataggaaaacactgacatttttctccagtaggaatgcctcttctccaactttccaagtcagataaatgctaccagcagttgagatgctacccagatgcattactaaagacccctcaaggtgaggagacttacacagaggaaggtgtctgtaacaagacatctggttccaaagggacc

SEQ ID NO: 2413 - DNA, 85 bp, Homo sapiens
ggttctgcagtaggggtaagcattccaggctttctcgtgtatattcagggctccctctggggccagcattcgaacaaacgtgggt

SEQ ID NO: 2414 - DNA, 122 bp, Homo sapiens
agccgactgaacagccgtaaggaggcggggctgctggccgcggtgacgctgactcagaagatcatcgtgtacctctcagacaccacactcatggacatcctgccccggatcagccatgaggt

SEQ ID NO: 2415 - DNA, 128 bp, Homo sapiens
cgactgggcggtgggctgaaccctgggcttgtccgtgccctggccatcagccccagtggccgtagtgtcgtggccggcttctcctcaggcttcatggtgctcctggacacccgcacaggcctggttct

SEQ ID NO: 2416 - DNA, 82 bp, Homo sapiens
gatttcatcgtcccatgggccacagtgcagcgacagaacctcctcagctttctgtattgtgctcagggcttcgggtactgca

SEQ ID NO: 2417 - DNA, 84 bp, Homo sapiens
tgaggctcggaagcgcctgaatccacagtgaaatatgagctcttccttggctttcacaggttcagtgttgccagggtcacgcct

SEQ ID NO: 2418 - DNA, 202 bp, Homo sapiens
tctggaatgcgaccggagcacttgctctgaggaatcccagggtgactctgtcggggaagaatccggtcacagcctcccctcagagacaggcctcagttcgagggcagcccattatctgtcgcagacatctgccatgtccctgagactgcgggaggcaggggatgcatgggtgtccccatctgtccctggtgagaagcaaggc

SEQ ID NO: 2419 - DNA, 91 bp, Homo sapiens
tctgccgcagcacgcggtcaatctccagtacgtccatccactggctcagctcgtgcttgagctctgccagccgctgctgcgtggcaatctt

SEQ ID NO: 2420 - DNA, 103 bp, Homo sapiens
caggtcgccgtcggtgaagacactcaggaaggacaaggagttgcagtcaaccccgttgaaggcatcggatgggtccaggctcttgagcaggtctcggacatgg

SEQ ID NO: 2421 - DNA, 144 bp, Homo sapiens
aaaagcccgtgtcctgaatgacaatgacttcctggccggtggtctcatctcccgggccggcctcgtcaagcccattttccctgggtggctcggccgccgccgcctccttcttcaggctctctgggcagtccccgtttaagagca

SEQ ID NO: 2422 - DNA, 211 bp, Homo sapiens
actgtgtccttctgggccgagtgggttgagggagaactgaaatcaacacaaaaagaagtcccaaagaagagagagaccacggagagatgagagctgcaggtggaaaaggctttccgcttcccctgagctgatgggatcttcaggatggtcgagaaaacgttcgtgtaagagataatcaggcaaagcacacaaatgagtcctgtgagacccc

SEQ ID NO: 2423 - DNA, 98 bp, Homo sapiens
gacgtgcgtgcgtggaggtcatgcagcacgatgggggaggggcgggagtggggctgcagtccccagccccctgcctgcgggggcggctgttgcatgag

SEQ ID NO: 2424 - DNA, 45 bp, Homo sapiens
ttgatgtctggcaccccaattctcgtctcgggattcttgtctaac

SEQ ID NO: 2425 - DNA, 113 bp, Homo sapiens
ggggcggcacgagcaggatgaggaagtgcagggccatggacatggccacagccaccagcagccaggggttcatccagggcggcatccgcagcagcgactggttctccgagacg

SEQ ID NO: 2426 - DNA, 149 bp, Homo sapiens
agtgccaggcatgtagtgatgacagccgggaggccctcggggatggccgccaccgccagggccacggcgatcttgaagtagtagacagcgccacgcagccaggagccaccgtgggccgggtcggcgaagtggccgatgttgatgaccca

SEQ ID NO: 2427 - DNA, 25 bp, Homo sapiens
ttcaacagcgcaaggtcacacaggt

SEQ ID NO: 2428 - DNA, 100 bp, Homo sapiens
cggcactgacccaggtagaagctgcgatcaccagaggcttggaggccaacaaactacagctgcaagagaagcagacattcccgccgtgcaacgcggagtg

SEQ ID NO: 2429 - DNA, 28 bp, Homo sapiens
cagcggcagcggcgcatagaggagcaga

SEQ ID NO: 2430 - DNA, 154 bp, Homo sapiens
accggaagtccttcatctcaagcatccaatgctgaaagcggcctgattttctctaccggaagcccttttccagaggctgggaacacggcccacctagcaggaagtcccacctccttgagctccgccacccttcccgaagtttttctgtcacctg

SEQ ID NO: 2431 - DNA, 35 bp, Homo sapiens
tggcaaaggggatgaggttgactccatcatcctgc

SEQ ID NO: 2432 - DNA, 111 bp, Homo sapiens
aaaagcacaactcttatccccagccaccccaaccctacccagcccagcggcccccagggccccgctaccccccatacactactcccccacgaatgagacggcagcgttctg

SEQ ID NO: 2433 - DNA, 133 bp, Homo sapiens
gacgaccatcttcacaggatagacaccaacccccaggcgccggggccgcggcacattgtatgtgatgcgaccactgctgttggtgatctctgtgtccaggtgtacccagcggcctgaggatggctctgccatt

SEQ ID NO: 2434 - DNA, 25 bp, Homo sapiens
taagaagagaagccgcggcccctgc

SEQ ID NO: 2435 - DNA, 101 bp, Homo sapiens
tctggtttatactgagcgatgatcgtgaccgtctgacccgcattcttcagggcaatggcagcctgctcatggctggcatttcggaggtccacaccgttgac

SEQ ID NO: 2436 - DNA, 39 bp, Homo sapiens
gactgtggccgctttctgtctaaccgagccctcaagcgg

SEQ ID NO: 2437 - DNA, 223 bp, Homo sapiens
gggcatcatgaccaccatcatggggttgtaggggagggccatgccagggggcggtccatagggatggagccctgggtgggctcggagattaggggcacccccagttgagcctctggatggaggagggcccccatcgctagtcccacttgcttccccaccccgccgaaggctgccccctcggctggagggctcagactcactgccactgccggacttggactcg

SEQ ID NO: 2438 - DNA, 146 bp, Homo sapiens
cccagtacgggagagaagcaaaggggaaaaagcacggatctgcgagggtggcggcggggggcgggccgcggggtgcgactcaaagccccggtctcagcggccgccgcgcgccaccgccaccgacgccgcgagcttcctccaggtac

SEQ ID NO: 2439 - DNA, 59 bp, Homo sapiens
gggtatttctttcggatcttctcgccctcagagcggcgcttctcgaacggatgctcttc

SEQ ID NO: 2440 - DNA, 81 bp, Homo sapiens
gagattgctcccactcacctgcggggcgccctggggacgctcaaccaactggccattgttatcggcattctgatcgcccag

SEQ ID NO: 2441 - DNA, 236 bp, Homo sapiens
ggaggcggccactacttcatcgaccgggatggcaaggccttccggcacatcctcaatttcctgaggctgggccgcctggacctgccccgtgggtacggagagacagcgctgctcagggcagaggctgacttctaccagatccggcccctcctggacgcgctgcgggaactggaggcctctcaggggacccctgcacccacagctgccctgctccacgcagatgtagatgtcagccc

SEQ ID NO: 2442 - DNA, 25 bp, Homo sapiens
tgaggtgtccatgaacaaagtcaca

SEQ ID NO: 2443 - DNA, 170 bp, Homo sapiens
gaattcgaggccagaaggcacccctggcagtggcaagaagggggcagcagaccccaaggccacggggccaggcgaggggaagagggcgaagccgggagctggggcaggtacctgggcgggcactggcgcctgcccgggcccaggatgtagcgccggctccgggtacccag

SEQ ID NO: 2444 - DNA, 147 bp, Homo sapiens
gggagattatccacaagccctctcggctaatccagcctccaggcgatcctaggggagggagggaaggacagcgccaggaagtcatcttctacctcatcatccgccgcaagcctctcttctacctggtcaacgtcattgccccatgca

SEQ ID NO: 2445 - DNA, 87 bp, Homo sapiens
catggtagtggaccgcctcttcctgtggactttcatcatcttcaccagcgttgggaccctagtcatcttcctggacgccacgtacca

SEQ ID NO: 2446 - DNA, 37 bp, Homo sapiens
caatagtttcttctatgataaactccgtaccaaaggg

SEQ ID NO: 2447 - DNA, 87 bp, Homo sapiens
actggctacctcgcgcctgctgctgttgctgctgttgctactactgcgtcacacccgccagggatgggccctgagacctgttctccc

SEQ ID NO: 2448 - DNA, 254 bp, Homo sapiens
taccctcagatcggggaccggctagacctgctctgcccccgggcccggcctcctggccctcactcctctcctaattatgagttctacaagctgtacctggtagggggtgctcagggccggcgctgtgaggcaccccctgccccaaacctccttctcacttgtgatcgcccagacctggatctccgcttcaccatcaagttccaggagtatagccctaatctctggggccacgagttccgctcgcaccacgatta

SEQ ID NO: 2449 - DNA, 27 bp, Homo sapiens
gtacggggcggccttcagcgccgcacc

SEQ ID NO: 2450 - DNA, 64 bp, Homo sapiens
agcccgggcggagaagaagggcagagagcgaacataggagtccagtcgggagcgaaagagctca

SEQ ID NO: 2451 - DNA, 63 bp, Homo sapiens
gctggaaccggcatgaggctgagcggacagaggttctcaggggacttcaagaggaacaccagg

SEQ ID NO: 2452 - DNA, 57 bp, Homo sapiens
gaaaggccattccctgaggaagatcctggacctgacggggagggcctcctaaagcaa

SEQ ID NO: 2453 - DNA, 57 bp, Homo sapiens
agaaattcccaggggatcagcacatagctatccgcccagcaaccaagacggccttct

SEQ ID NO: 2454 - DNA, 33 bp, Homo sapiens
tgatacggcagaagacggacttctcctgggtaa

SEQ ID NO: 2455 - DNA, 31 bp, Homo sapiens
ggctcccatgggcacggaagcggggaacttt

SEQ ID NO: 2456 - DNA, 80 bp, Homo sapiens
atgtggctgtttggttgccccttactgctggatgatgttgctcgggagtcctggctccttcctggctccaatgacctgct

SEQ ID NO: 2457 - DNA, 190 bp, Homo sapiens
ccggaagcggccagacaccttcagcctgggcgtgtgtaatggctgtcaactgctggctctgctcggctgggtgggaggcgaccccaatgaggatgctgcagagatgggccctgactcccagccagcccggccaggccttctgctacgccacaacctgtctgggcgctacgagtctcgctgggccagcgtg

SEQ ID NO: 2458 - DNA, 88 bp, Homo sapiens
atctggatcttcgagttggaaaggaatgtatccatccccataggctggagctatttcattggttggctggtgcttatcctatacttca

SEQ ID NO: 2459 - DNA, 37 bp, Homo sapiens
gccttctgcggcaggcggacagatcctcggcgcggca

SEQ ID NO: 2460 - DNA, 93 bp, Homo sapiens
caggccgactgatgtatgtcattaacaatgctcacaggatcggcgtcaccgccatcgccaccaccagtgactgtaaaagggtcatcagtggcg

SEQ ID NO: 2461 - DNA, 24 bp, Homo sapiens
ggttcccaagtgacagtcagtgtc

SEQ ID NO: 2462 - DNA, 28 bp, Homo sapiens
ttcttagcacctttcttcgcgctgctat

SEQ ID NO: 2463 - DNA, 24 bp, Homo sapiens
gaagcccaggatgtcaatggcact

SEQ ID NO: 2464 - DNA, 102 bp, Homo sapiens
cttcctctagggaagtctgtagttcactcttctcatgatcaagttgtttctttactttctccagttcatggatatgctttccaccctctgcaatttgctctg

SEQ ID NO: 2465 - DNA, 26 bp, Homo sapiens
tttggagaggttgacgttggattgtt

SEQ ID NO: 2466 - DNA, 386 bp, Homo sapiens
ggcgcagccacacacgacctcggtcccgtacttcgcgcgctctcctgcaccgccgccgccatctcgctcaggagctcctccacaaccgccggcaacactacggccatcgcgccgcaggacacgccctccacgaccggcggaccgccgcgacgctccagctgactgcgcctacctgtggaggatcctgaccccccgccggggcagggcgagacggagtgacgtcggggcgcgtcatcgcgcgtgcggacgcagggatgtcctgctcagtcgtcagggcccggccaatccggagggcgctcggcgcgtggtcgggggccaggagcgcgtctggcctgcagtgcgcagaggacgcggcgggagcatgttccggctcctgagctggagcc

SEQ ID NO: 2467 - DNA, 29 bp, Homo sapiens
tgaatgaggtgatgggtccccttcctctc

SEQ ID NO: 2468 - DNA, 63 bp, Homo sapiens
actgggcttcatgggagcagacgctgcctacgctgtgtgaggacccgtcaggggcaggtgtcc

SEQ ID NO: 2469 - DNA, 36 bp, Homo sapiens
catggcgaagagcgcgcggaacatctggtccaggct

SEQ ID NO: 2470 - DNA, 26 bp, Homo sapiens
ccgtgcgatgcccgcgcaggggcggg

SEQ ID NO: 2471 - DNA, 26 bp, Homo sapiens
cgcatccaccggtcactcgccagcca

SEQ ID NO: 2472 - DNA, 70 bp, Homo sapiens
agcaccaagtacagtccgcagcgggtgggcctgacccacaccatggagcatgaggacgtcatccagatcg

SEQ ID NO: 2473 - DNA, 26 bp, Homo sapiens
caggcagccgccgaggcttttccagg

SEQ ID NO: 2474 - DNA, 56 bp, Homo sapiens
cttgctcggcccacgtggccagtgtccccgccaagctgtgggcccgcattgtgagc

SEQ ID NO: 2475 - DNA, 35 bp, Homo sapiens
ttgaggatgaagcagaactcggagttgaggaggct

SEQ ID NO: 2476 - DNA, 75 bp, Homo sapiens
ttgtactgccccagatcgtaactggagttgcagccaaccttgtcaatgccctcgccaactatctgtttctccatc

SEQ ID NO: 2477 - DNA, 58 bp, Homo sapiens
gcgaaggccccgtgtcccacgagatccctcttgctgtactcgaagtcacccaccacct

SEQ ID NO: 2478 - DNA, 25 bp, Homo sapiens
ggttcaggctcagattctcggatga

SEQ ID NO: 2479 - DNA, 38 bp, Homo sapiens
ggaaggacacatacgtggtgatcttccgccgcagcttg

SEQ ID NO: 2480 - DNA, 61 bp, Homo sapiens
acacaaatatagtttctacgacaacaggccaggtcagagtgaagcctaatgaacaaacaaa

SEQ ID NO: 2481 - DNA, 62 bp, Homo sapiens
gaggtggaaggatcgcttgggcccaggagacagagggtgcagtgaactgtgctccagcctgg

SEQ ID NO: 2482 - DNA, 92 bp, Homo sapiens
agcctcagcgacctcatattgcatggagctctttctttataaatgtttgcctaaggtgattcctatgtgtttcaaagggtctgacgtttcat

SEQ ID NO: 2483 - DNA, 79 bp, Homo sapiens
gcatccacaggctgacatggaccgtggaggggtggcactgtttaagcagcccagcacaccactttctggtgtggtggct

SEQ ID NO: 2484 - DNA, 29 bp, Homo sapiens
tgggcggcggcacccaaacaccaaggtca

SEQ ID NO: 2485 - DNA, 34 bp, Homo sapiens
agctgctccgtccgcagggtgtaacaggcctcca

SEQ ID NO: 2486 - DNA, 78 bp, Homo sapiens
actgagcgatggagcgtgggtagggagggtccacagtgtccactcgccgtgtgcgaagattgactcggtagtacttgt

SEQ ID NO: 2487 - DNA, 69 bp, Homo sapiens
tgccgttgctcgactctaaccgcttggaggcgcagtgcatcggggctttctacctctgcgccgaggctg

SEQ ID NO: 2488 - DNA, 113 bp, Homo sapiens
aattggtggccataggctggcagttggagtccagctggcctgccagggcctcctggagcactttggtctctgtctccgcacgccgaagtgagcgggtaaggtgggtcacctcc

SEQ ID NO: 2489 - DNA, 25 bp, Homo sapiens
gacccggacacctgcctctatcaat

SEQ ID NO: 2490 - DNA, 61 bp, Homo sapiens
aagatctctgggacgccattgtgattggggcggggatccagggctgcttcactgcatacca

SEQ ID NO: 2491 - DNA, 74 bp, Homo sapiens
ccatggacaaagccggataatccgaaaggcgtacctggaagacttttacacccggatgatgcatgagtgctatc

SEQ ID NO: 2492 - DNA, 101 bp, Homo sapiens
cgggttcaagctggcccctgtggtggggaagatcctgtatgaattaagcatgaaattaacaccatcttatgacttggcaccttttcgaatcagccgtttcc

SEQ ID NO: 2493 - DNA, 36 bp, Homo sapiens
gctcccgcttctctcgcagaaccttctgcttgtcct

SEQ ID NO: 2494 - DNA, 34 bp, Homo sapiens
agggaggccatctcggtcacagccaaatggatct

SEQ ID NO: 2495 - DNA, 90 bp, Homo sapiens
cacgtccaggatgttgcgcttcgtgacccggagctcgcggtgcttggggggcacatagccgtccctcagcgaaatgagcacgggttcggc

SEQ ID NO: 2496 - DNA, 87 bp, Homo sapiens
atcaacttccggctgaggcagtacatggacaagattatcctcgccatcctggaccacaatccctccatcctcgagatcaaacactaa

SEQ ID NO: 2497 - DNA, 24 bp, Homo sapiens
catttgcagcttacgtttactggt

SEQ ID NO: 2498 - DNA, 57 bp, Homo sapiens
ttacatgaacataccaccctagtaaaggcaagttctgtaagcttacattgctatttg

SEQ ID NO: 2499 - DNA, 24 bp, Homo sapiens
acctcactgaatgggtggatggct

SEQ ID NO: 2500 - DNA, 161 bp, Homo sapiens
gggccccttggagatcttgcagctggactttgaaatggagaacttcaccagccagtcagtcaagcggaggatcatgtggcacattgactaccgtggccacggcgccctgcctgacctggagcgggcagtcactgagctgacggtcattcagcgggatgtgc

SEQ ID NO: 2501 - DNA, 113 bp, Homo sapiens
ctttctggaaccttgtgggctctgccttcacattggtcttaggtgcctcatatacagagagaaccttgtttttcagcttgttttggatccagggatcaattgaggcacaaagg

SEQ ID NO: 2502 - DNA, 87 bp, Homo sapiens
tgtttccatgctgggagttacttgtttttgaagaagcaggcaactcttggaaatcactgaatgagtcatcaagggatcctgacttag

SEQ ID NO: 2503 - DNA, 70 bp, Homo sapiens
tggggttggagctagagctggcagcagagctggagccaaggtggaggtgggagatagcatccttggctct

SEQ ID NO: 2504 - DNA, 26 bp, Homo sapiens
gtcattgccgggttggacccgaagac

SEQ ID NO: 2505 - DNA, 80 bp, Homo sapiens
gattgatggtgtcagcatccagagcgaccaactgaagggtccgggccagctcgaagattcgctcgatttcactctgcacc

SEQ ID NO: 2506 - DNA, 89 bp, Homo sapiens
gaggctcgcctctagtgtcctccgctgtggcaagaagaaggtctggttagaccccaatgagaccaatgaaatcgccaatgccaactccc

SEQ ID NO: 2507 - DNA, 101 bp, Homo sapiens
accatgtcttcaactgtctctgcaatgagggacagtgctggggtgtcggcttgaatggtttcagctttcctccgaatagccctcatcgtcacagggatgga

SEQ ID NO: 2508 - DNA, 97 bp, Homo sapiens
gttgtcctcgttatggagaaagaagacaaacagaaagcgactgggggaaacgctgtgtggacaagtttgacattattgggattattggagaaggaac

SEQ ID NO: 2509 - DNA, 192 bp, Homo sapiens
agcggcgcagaccgtagccccaatgcgggcgcagcccctgactcggccccgggccaggcggcggtggcttcggcctaccagcgcttcgagccgcgcgcctacctccgcaacaactacgcgccccctcgcggggacctgtgcaacccgaacggcgtcgggccgtggaagctgcgctgcttggcgcagaccttc

SEQ ID NO: 2510 - DNA, 51 bp, Homo sapiens
ccactgcccactgactgctgccatgagcagtgtgctgccggctgcacgggc

SEQ ID NO: 2511 - DNA, 86 bp, Homo sapiens
atgtcttcgcggtgtctcttcttctggcgggtggacgcctgtcccttgtgggaggagtaggaactgagggcacaccacacggccag

SEQ ID NO: 2512 - DNA, 71 bp, Homo sapiens
ccacttgtagactcccaggggggctcccattatagaaggaggaggaggatgacgacgaggaagatgaggaa

SEQ ID NO: 2513 - DNA, 134 bp, Homo sapiens
tattgctaataccctggatctcacagatagaattctacctaggcttcaagctagagaaaaatgtaagccacagctgttgaacttcccaccttataccagaaatcagatagtcactattttgcaagatcgactta

SEQ ID NO: 2514 - DNA, 170 bp, Homo sapiens
cgggccgaggatgcggcgcagcgcctcggcggccaggcttgctcccctccggcacgcctgctaacttcccccgctacgtccccgttcgcccgccgggccgccccgtctccccgcgccctccgggtcgggtcctccaggagcgccaggcgctgccgccgtgtgccctccgc

SEQ ID NO: 2515 - DNA, 76 bp, Homo sapiens
gtttgaagagtgcgtttcatctcgataagctcattccgggctgaggtggtggcgccagcgtcgtcagagatctgct

SEQ ID NO: 2516 - DNA, 25 bp, Homo sapiens
ctcgcgggaagaataggattggcca

SEQ ID NO: 2517 - DNA, 75 bp, Homo sapiens
ctgctgcatgacgctgtccttggggtcgaagagcatgtagctggcggcgctgcgggcagcctggcgcacatcatt

SEQ ID NO: 2518 - DNA, 86 bp, Homo sapiens
cccgagacccgagagaaccactgacccctgcgccacgctgggcccgaggggagcccggggctcgctcgggcgcgcgtgtgaggcgg

SEQ ID NO: 2519 - DNA, 102 bp, Homo sapiens
agacatcacagagcgtgtacgatggccgctttctttctcgcttgggcttaggtggttctgggggccgagggaggcactcagcagctccagatatgggggtct

SEQ ID NO: 2520 - DNA, 98 bp, Homo sapiens
tgcgcctgtggcagaggttgtactgtttgcaaggctgttggctgtgctcctgcagctgggggcagcagttctggggtgacatgatgcaccacgtgtcc

SEQ ID NO: 2521 - DNA, 71 bp, Homo sapiens
cagccgccccggacgacaacagcgcgggcggcagcagcagcagcagcagcagtagcgtcacggcggcccag

SEQ ID NO: 2522 - DNA, 79 bp, Homo sapiens
ctccgcatctggtccagcgcagtgagcatctgttccagctgctgcatcttctgcctggtcactgactggttgtttccat

SEQ ID NO: 2523 - DNA, 88 bp, Homo sapiens
gtggctgcagtctgtagaaggcgtgattcttcccacaggcaccgggccacaatccgggcaatctccattggcttctcaagatacctgc

SEQ ID NO: 2524 - DNA, 48 bp, Homo sapiens
cgctgtcgctcttgtccaccagcacggcgtccgactcctcggtgatct

SEQ ID NO: 2525 - DNA, 99 bp, Homo sapiens
cagcaccagcacgccgttcacctggtccgacttgatcagctcttctgagccggcccccgacggctcctccgctgcctgagccccagcggaggaaggctc

SEQ ID NO: 2526 - DNA, 29 bp, Homo sapiens
ccagccctgtgacaagggttcctgtccag

SEQ ID NO: 2527 - DNA, 24 bp, Homo sapiens
ccaccctcaaggccagggtgtggg

SEQ ID NO: 2528 - DNA, 37 bp, Homo sapiens
cgccagggcgcgcagcgtgtcgtcgggtgggggcggc

SEQ ID NO: 2529 - DNA, 177 bp, Homo sapiens
gtgggagtcgatggccacagcacaggcaccagcccccggacagtgcacggtacacagcagctcctgccgttggctcaacgcggaaatctccgccagcgagggcaccagctctctgccgcgcgtccggcccagcgctttccggatgaagcgcgcatattccgccagttccgagtccgg

SEQ ID NO: 2530 - DNA, 202 bp, Homo sapiens
gtaccgcaccctatcaacttcggaggccctcacaacttcgttcaagtgcccggtttcccacgccgtggccgcctggcagtctcatttcgcttccgcacctgggacctcaccgggcttctccttttctcccgtctgggggacgggctgggccacgtggagctgacgctcagcgaagggcaggtcaacgtgtccatcgcgcaga

SEQ ID NO: 2531 - DNA, 48 bp, Homo sapiens
tggcgatgagtttcgagtggccgtggcagtatcgcttcccacccttct

SEQ ID NO: 2532 - DNA, 25 bp, Homo sapiens
gtgtcccgtcccagcagatggtgaa

SEQ ID NO: 2533 - DNA, 179 bp, Homo sapiens
tgcttgtcaatcgctagcccggctcttaaagcggcaaggcctctccgcgagggggcggaggtccggaggagaggggaggtgaggagaacgcggaggccggcacaactcggaggaagtagtctttcccagcagctggtacgggggcagccaggtagtggtttgggagacaccgcacagac

SEQ ID NO: 2534 - DNA, 88 bp, Homo sapiens
cagccctctcagcgtacagcatgagctggctgaagcagccccaaaaggggcagcgtgtgagcagcaccgaacccaactgcatgatcag

SEQ ID NO: 2535 - DNA, 27 bp, Homo sapiens
tccaagtgggggcaccgacgacatatt

SEQ ID NO: 2536 - DNA, 32 bp, Homo sapiens
agcagctggacacaagggtccgccaggagcca

SEQ ID NO: 2537 - DNA, 49 bp, Homo sapiens
tgaggagacgtaggagcggcgagcagcggaggtgatgcgtctcctctcc

SEQ ID NO: 2538 - DNA, 86 bp, Homo sapiens
ccatgcagaatccttcgtgagtggaggtattccagaccctccagggcctggcccaggtagtacagggcccggtcctctgggagaca

SEQ ID NO: 2539 - DNA, 60 bp, Homo sapiens
agaggtgctggaagagcatccgcagagtgtcgtggttgggagcgggcagcgagcgcacca

SEQ ID NO: 2540 - DNA, 61 bp, Homo sapiens
aagctggccgctcagaacatggccaaggagcgtgaagggattgctccactttaccaccact

SEQ ID NO: 2541 - DNA, 37 bp, Homo sapiens
cctggtgtccacggtagagggtatgccgacgatctac

SEQ ID NO: 2542 - DNA, 32 bp, Homo sapiens
gcagctggaaggggatcgtggccctgagcggc

SEQ ID NO: 2543 - DNA, 69 bp, Homo sapiens
agcccgccggagccaccgttcctgctgctgccgccgctgcccgaatcggaaccgtcgggccgcagccgc

SEQ ID NO: 2544 - DNA, 38 bp, Homo sapiens
cctgtgatttctgtcattatactcttctccccagtttg

SEQ ID NO: 2545 - DNA, 37 bp, Homo sapiens
caaagaactggcttgccttgcccgtcttcacctcctg

SEQ ID NO: 2546 - DNA, 160 bp, Homo sapiens
tgctacgtgcgaggcaatgacctagagctggactccagtgatgactggcagacctaccacaacgagatgtgcaatagcaacacagactacctggagacgggcatgtgccagctgggcaccagcggtggcttcacccagaacactgtgtacttcggcgccc

SEQ ID NO: 2547 - DNA, 34 bp, Homo sapiens
tcctccagaacccgacgctgtgcagtctcctttt

SEQ ID NO: 2548 - DNA, 129 bp, Homo sapiens
tgccgttgaagcgcaccacgacgtccagcttccggtcctgcaggccggcgcgctcctgcctcagcagccgccgcgccgcgctccttgtcgccgcctgcgcgctggggcgctccgttcgaacagcttccg

SEQ ID NO: 2549 - DNA, 32 bp, Homo sapiens
tgtagccggagtggggcttagcaaggatgtaa

SEQ ID NO: 2550 - DNA, 321 bp, Homo sapiens
ttttccgacaggtagagccagcgcaggtccttggctccctggaaggcgcctgcgcgcagctcacggatcttgttgttgttgagctgcaagatgaagaggttgaccagcggggagagcaacccccggggcagctcagtgaccttgttgtggtccaggtagaggtaggtcagctcggtcaggtcgtcgaaggcacctgcgcgcagcacgcggatgtcgttatgggacaggtacaagtagataagttgcttgaggccgcggaaggcaccggcggccacctcgcggatctggcagtgctgcaggtgcaatgacacgaggttcggc

SEQ ID NO: 2551 - DNA, 69 bp, Homo sapiens
ggcccatggacgatttatgccccagggggctggaggccacacccgggaggctcggatccagacactgga

SEQ ID NO: 2552 - DNA, 49 bp, Homo sapiens
ctgtgacctcgccacagtggccctcagccctccacctccggcgggggcg

SEQ ID NO: 2553 - DNA, 47 bp, Homo sapiens
tggggctgacccttggggagcctccctggagacctccgacacacctg

SEQ ID NO: 2554 - DNA, 34 bp, Homo sapiens
gagtgctggtgacgcacggcattagcttcctgcc

SEQ ID NO: 2555 - DNA, 125 bp, Homo sapiens
atcacggcaactgaagcggctggaatcagtcagccgctcacctatctactcccacttttcggagacagtgactggtgccagtgtcatccgggcctacaaccgcagccgggattttgagatcatca

SEQ ID NO: 2556 - DNA, 28 bp, Homo sapiens
gctgctacccctacatcatctccaaccg

SEQ ID NO: 2557 - DNA, 38 bp, Homo sapiens
ctgccgcccatccgctattcccacgccggcatctgccc

SEQ ID NO: 2558 - DNA, 39 bp, Homo sapiens
ataccatggatttttctccgagaagtggatactttgcct

SEQ ID NO: 2559 - DNA, 29 bp, Homo sapiens
actgcaaccctgctcagtgctccgggcgc

SEQ ID NO: 2560 - DNA, 27 bp, Homo sapiens
caaaggggcagccttcagatccaagtg

SEQ ID NO: 2561 - DNA, 163 bp, Homo sapiens
tccatcgtgcatcttaagggctccaatcgtcaaaaataggaaaaaaaaaatctttggaatagccaattaagttgaataaaaaaatccacacgaatgcggtttggttggggcaggaatccactcctatgttcctggtaatctgatcccgctccatgaatcctgg

SEQ ID NO: 2562 - DNA, 69 bp, Homo sapiens
gtgctctccgggaccaggccgagcgctgcagcgacaagtaccgcaccatcactggacggtgcaacaaca

SEQ ID NO: 2563 - DNA, 163 bp, Homo sapiens
tccgggctgtctccaaccagattgtgcgcttccccaatgagagactgacctccgaccgtggccgagccctcatgttcatgcagtggggccagttcattgaccatgacctggacttctccccggagtccccggccagagtggccttcactgcaggcgttgactg

SEQ ID NO: 2564 - DNA, 94 bp, Homo sapiens
gccgttgcgcttgaccccgggcgtccagccgtagggaagagagaagccgtcctcatactccgccggcagccagcgcacaaaggcacggttggag

SEQ ID NO: 2565 - DNA, 87 bp, Homo sapiens
gcaggcggaaagcctggagttcctgtgccaggaggctgaactgctcggtttggctgcggcactgttcttcgagctctcgaacccggg

SEQ ID NO: 2566 - DNA, 106 bp, Homo sapiens
agcgtctcccgctggttgcgcagcgcgatctgcctctgcagccgcagcacctcccgctgggactcgcgcagcagccgatcgaagtcccgcacgtggagccactggg

SEQ ID NO: 2567 - DNA, 97 bp, Homo sapiens
gacgtgagcgggttccggttgtctggagcccagcggcgggtgtgagagtccgtaaggagcagcttccaggatcctgagatccggagcagccggggtc

SEQ ID NO: 2568 - DNA, 35 bp, Homo sapiens
cgtagctgaggaatccgatccgtgactccttggca

SEQ ID NO: 2569 - DNA, 47 bp, Homo sapiens
ccagcggtggcagcccgagaggctcgcgaccctctcccggacgccgg

SEQ ID NO: 2570 - DNA, 26 bp, Homo sapiens
gctggagactagcgttaaccggcggg

SEQ ID NO: 2571 - DNA, 25 bp, Homo sapiens
tgatggcattgtggcccacttccct

SEQ ID NO: 2572 - DNA, 62 bp, Homo sapiens
cggggctgcacgtctcggcactgggcccgcacccgcccgccgcgcatctgcgctccctcaag

SEQ ID NO: 2573 - DNA, 86 bp, Homo sapiens
agctgaccgcgaactcctgcgtggggtgctcctggggcgggaggggcgcgctcagcctcgctctccccgggactctcacgctcaag

SEQ ID NO: 2574 - DNA, 38 bp, Homo sapiens
gacctgggcgagtgactcgttgtgtgctgtgcccgcag

SEQ ID NO: 2575 - DNA, 26 bp, Homo sapiens
tgacagtcacccatgggacaagcagc

SEQ ID NO: 2576 - DNA, 164 bp, Homo sapiens
gacagtgtagggtcattagctgttgagccgccccgggcgggcccaagcctttggatctcaggtgaccggcacaggcggccgcggggtccggaactgcttgttccggcagtggaagagacgcgccggcgttggccgctgctgctagcagcttgaaccccagggtc

SEQ ID NO: 2577 - DNA, 37 bp, Homo sapiens
ggcctcatcatccgggccaggacattcagtaagtctt

SEQ ID NO: 2578 - DNA, 74 bp, Homo sapiens
aggtctcggcgctgggaacggagccattcctggatgaagtcctgggggtcggtgctaaaactgagcatgaaatc

SEQ ID NO: 2579 - DNA, 45 bp, Homo sapiens
tggctatgaaacgtgggctctgccagatccgcgaacaagcactac

SEQ ID NO: 2580 - DNA, 35 bp, Homo sapiens
gcaaccccctcgtgtaccattgagggagaggcata

SEQ ID NO: 2581 - DNA, 197 bp, Homo sapiens
agttgaaattctcgacgccggtcataggcattctgtatgccgctgtctgcccataatgctcttatagcaggaagatattgtaagaaaacccttgtttccaccattccttgggctgccatgggggcccgggtatcaaacgacatcatcttatctccatgttgttggtttgagttgtctccccagggaatatgaagctt

SEQ ID NO: 2582 - DNA, 67 bp, Homo sapiens
gggctgtactgatactccaggctacaaccaccctccttgtccagcgtgtccacagggtgatggacca

SEQ ID NO: 2583 - DNA, 74 bp, Homo sapiens
caattgcactccattcttccgccttccttgttttctccaaaaccacctgataggggggatgtcctgatttctga

SEQ ID NO: 2584 - DNA, 194 bp, Homo sapiens
agatttcccagtgcactcaggagatcgtcggtggccttgatgaagccagtgctttttgggaaaaacggagcaaggcaacgcacgacagaagcggtgcaccaaggagtaaagattcagttccatgggccccacttgctgtttgagaaaatgtcctgcttccttcctagctgacttgactcccagcagtaacaggt

SEQ ID NO: 2585 - DNA, 25 bp, Homo sapiens
ggcccaagtttgttgacacacactg

SEQ ID NO: 2586 - DNA, 82 bp, Homo sapiens
gccgcaggcggcgcccccacagcagccggcggcacccccgcagcagccacaggcgcacacgctgaccacgctgagcagcgag

SEQ ID NO: 2587 - DNA, 24 bp, Homo sapiens
tggtatgtacagtccttcctgttt

SEQ ID NO: 2588 - DNA, 112 bp, Homo sapiens
gcgtggactacatcgctccctggtgggtcgtgtggctgcacagcgtcccgcacgtcggcctgcgcctgcagcccgtgaacagcaccttcagccccggcgacgagagttacca

SEQ ID NO: 2589 - DNA, 25 bp, Homo sapiens
tggcattgttgctgcttctgttggt

SEQ ID NO: 2590 - DNA, 30 bp, Homo sapiens
gccaagagtgaggcggccaccaaaagcagc

SEQ ID NO: 2591 - DNA, 353 bp, Homo sapiens
gagcctccgctgatgctgaggatgggcacatgggtctgggaggagatgaagtcaaggatctgggccaccgcctcggtgtccacgttgtcctcaaagacaatgccgtggacgtgggcagcacccaggaggccgcagatctgggtgaggaggctgctggggttggtggtgttgaccccaactgtgagcggctggatctccaggggtaggtccaggaagctctggggggtgaggcgggcacggaactgggcctggggcggccctgagctgctaaacaccacagccaccgtcatgccctgctcgccctgccccggacccagccctgcccaggcaccgaagagcgaggtgagcaacag

SEQ ID NO: 2592 - DNA, 98 bp, Homo sapiens
gctctacctgggcaccgagagtggcaacgtgtttgtggtgcagctgccagcttttcgtgcgctggaggaccggaccatcagctcggacgcggtgctgc

SEQ ID NO: 2593 - DNA, 42 bp, Homo sapiens
cggcaactggcgttcacatcgagccgccgtggggtgcagcct

SEQ ID NO: 2594 - DNA, 51 bp, Homo sapiens
atatgtttgatccccatggctggtctgaggactcctactatgaggcattag

SEQ ID NO: 2595 - DNA, 111 bp, Homo sapiens
gctgcctatggcacccacctgagcccacacgtgccccaccgcgtgctaagcacatcctccaccctcacacgggactacaactcactgacccgctcagaacactcacactcg

SEQ ID NO: 2596 - DNA, 150 bp, Homo sapiens
gccagccaccgcattccgggtggatggagacagccccgagagccggctgaccgtgccgggcctcagcgagaacgtgccctacaagttcaaggtgcaggccaggaccactgagggcttcgggccagagcgcgagggcatcatcaccataga

SEQ ID NO: 2597 - DNA, 66 bp, Homo sapiens
tggtccaggcaggacagcgtcttctcaacattctcctgcagccgctgcagattctccgtctgcttg

SEQ ID NO: 2598 - DNA, 156 bp, Homo sapiens
tcagcggcagtccccgaacgttgggccggcccagccccgccccgcgctgttgtttgtggtgtcggccgggccgcgggagtcgaaccacaacattcgccgggcgggcggcggcggagcgggcggcggagcggcggcagcagcggtgagcgcgagccc

SEQ ID NO: 2599 - DNA, 26 bp, Homo sapiens
aagctgagctcctcggcggcgtcctt

SEQ ID NO: 2600 - DNA, 71 bp, Homo sapiens
tcagcggttgcgtggagcccccgcccagctggaagccccagcagatgccaccgccagaagagcccttatga

SEQ ID NO: 2601 - DNA, 67 bp, Homo sapiens
atctggttcttcaagtcgtagaccttccccagccagcagtcataggcaatgtagtccccatacatga

SEQ ID NO: 2602 - DNA, 226 bp, Homo sapiens
acttctcgcagaagcggctggtgaaggggaagcaggtgaggtgctcgatccagggccagttaatggggtagatgtacagccacagcacgagggcggcgaagaggccggcaaaggccagcagtgacaccaggatgagtgcccgcttgcggtacttgtcgctggtgccgaaggtgatgtagggcaggaaggcgaaggccagcagcaggccactgaggaagccgaagat

SEQ ID NO: 2603 - DNA, 125 bp, Homo sapiens
ctcttgcggcgtggcaggtgggagtagccagaacggacactggtgaaggaggtgagggacaggactccgggggtcagcggtgggtgcggggcgtggggcctgtccatctcctccgggtggcggaa

SEQ ID NO: 2604 - DNA, 134 bp, Homo sapiens
agcatgctgtcctgctcgccaggggcctgggtctctttctcgggtggcgggatggtgatggagaggttgggtggcttccggctctgcaggcggctgctggacacagaggacacgctcccgccattcttgtcagc

SEQ ID NO: 2605 - DNA, 166 bp, Homo sapiens
tcgagtctgagtttgcccgcggcttcctgggtcttgctgtgaagggctttagagcatgttcttgtcttctccttgctctgtacagatgctccggtgtcaagcctcagtctgtggaagggtggctggacagacaggtggctggaaggacagatagacagctccaggc

SEQ ID NO: 2606 - DNA, 129 bp, Homo sapiens
ccgcggtcggtgtcatcggagcgggcccctggggtgccggagccggaggagctgtgggaggcagagatggagcggctgcgcggctctgggacgcccgtgcgcgggctgccctatgccatgatggacaag

SEQ ID NO: 2607 - DNA, 68 bp, Homo sapiens
gcccctcgtcgatgcctatgacagccacgcccagggcctcctgggccacgtctcggagcaggcaggcg

SEQ ID NO: 2608 - DNA, 234 bp, Homo sapiens
gaggcccgcggctgttgctacatccctgcaaagcaggggctgcagggagcccagatggggcagccctggtgcttcttcccacccagctaccccagctacaagctggagaacctgagctcctctgaaatgggctacacggccaccctgacccgtaccacccccaccttcttccccaaggacatcctgaccctgcggctggacgtgatgatggagactgagaaccgcctccacttc

SEQ ID NO: 2609 - DNA, 309 bp, Homo sapiens
accaggcttggcatggtctgaactggaaaccctgagaatgtttctgcagtgggacaggagggacgtcttcccatgccttccctagaaccggaggccccggacttctctggaaaaccgcctgtctgcaggcccgattcaaatctatgggggctgcacttcccttttacattttgatgtgtcaaaggcttttggagtgaccaaaagcacagaggcagcgggtggggcgcctgggtggtccccaaggtcgctgccacccttgcccggggcagaggcagaagcccacatatgctgtgacgctggccacctttt

SEQ ID NO: 2610 - DNA, 100 bp, Homo sapiens
gatgcgcctcagtgtctttttaaagaagcaagaagagagccagtttcaccctctggagtggttggcaagggaagcctgcaaccaggacgctctccaggag

SEQ ID NO: 2611 - DNA, 455 bp, Homo sapiens
gagcccggatcttgtgctgcttttctcactgacgtgttgccttttttctttacaaaatctgctttgatacttaggacctctctggactaatttctcttcctagacagctcagcacagctattgatatgttagaggcagtatccttaatattcattctaaatgagttaacgacttaacttgaaattgggcctaaggagtgagaactacaaaaatacaaaatgcttgtccaggactcagccatgcacaccttgagcagcgccggcaggaggcacggaaggaactgtgctccgttctcctcactgtcatggtgccaccagtgtctgatgaagggcagagtgacccagactgcaggcagtaactgacttcacacagtccctggcatttagtcatctgtgattgttttatcactctggactgtgcagagccacctgccaccgagatctgcattccgactg

SEQ ID NO: 2612 - DNA, 103 bp, Homo sapiens
cgctgctccggagctcctcggcgccgccggcggccacggacgcggcgcacatgtcggcgtccacgggcaccgaggtgcagatgaagcgcgtcggcccgaaatc

SEQ ID NO: 2613 - DNA, 80 bp, Homo sapiens
ggccttgttggtcacaggtcccgggctgcccatgctgagctcctgcagccacggccgggtgcggaggaggatgtgctcct

SEQ ID NO: 2614 - DNA, 56 bp, Homo sapiens
caggtagcccggacacgggacatcatcatcggacgtccccttcaggagaatcggga

SEQ ID NO: 2615 - DNA, 236 bp, Homo sapiens
gaccgccacgcacagggatacagggggcgcctccgcccggctaaaaagcgcggcctgcgccgccgccgccgcctgatttcgctcgggcttcgggtgacttcgccgcaggacctacccagctcgctcacttcgctcgctccgcgtcccccatgccagcccccaacgcagggcgcccggcgaagccacgggactggcgggaggagcacgcggggccggaggaaatcctgaagctgacc

SEQ ID NO: 2616 - DNA, 44 bp, Homo sapiens
agggagaggagcccgacatcgcagtccccaagttcaaacagagg

SEQ ID NO: 2617 - DNA, 34 bp, Homo sapiens
acaagaacccacacgtcgccttgtatgccctgga

SEQ ID NO: 2618 - DNA, 77 bp, Homo sapiens
ttcttccaagtactccaccatccccaagtttggcatcgagaaggaggtgcgcgtgtgtgagccctgctacgagcagc

SEQ ID NO: 2619 - DNA, 28 bp, Homo sapiens
atgcagaacgacgtgaagctgccccagg

SEQ ID NO: 2620 - DNA, 54 bp, Homo sapiens
cgtccacacggagcgcgtcttctgcctgggcctgccgcacgccgcggactgctg

SEQ ID NO: 2621 - DNA, 32 bp, Homo sapiens
ccagcacccggcggcccgcgaggaacagctcc

SEQ ID NO: 2622 - DNA, 33 bp, Homo sapiens
gctcggcctcctcgtcagtgacagatctgtact

SEQ ID NO: 2623 - DNA, 24 bp, Homo sapiens
cccagctctgcacggagcctgttc

SEQ ID NO: 2624 - DNA, 106 bp, Homo sapiens
gagaggtatcttgtcggcctgtgaggtcggacgaggagatgttgacgggggccccgcggtgcagccgcatactcactttccgctctctctccatgccggagacggg

SEQ ID NO: 2625 - DNA, 118 bp, Homo sapiens
ctgggtccgatacgccgagcgggtgctgggtcgccccatcactgcccacctctgcaccgccaagtccccccagcaggtcatgggctctttggtgaaggattatttcgccagacagcag

SEQ ID NO: 2626 - DNA, 33 bp, Homo sapiens
tgctgcataccacgtaccagagccaggagcgtg

SEQ ID NO: 2627 - DNA, 25 bp, Homo sapiens
catccttcagcgcctgggcacagag

SEQ ID NO: 2628 - DNA, 24 bp, Homo sapiens
acagcgccgaggtgcgccgagcag

SEQ ID NO: 2629 - DNA, 130 bp, Homo sapiens
gcaggtactggcaggagcgttcttgctgacacgactcggacttcaccatggcctggtccatgttcaccgaggccttctggtaaacctcccgggcccggctcacggtgagcgtggaggaccaggcgctctt

SEQ ID NO: 2630 - DNA, 65 bp, Homo sapiens
gggagatgtgggggcacaatgggtggatgggggtgacaagggacatgagtcagtgccaagcccag

SEQ ID NO: 2631 - DNA, 35 bp, Homo sapiens
agaaaaaaagtagcgcaagggcagagagaggtagg

SEQ ID NO: 2632 - DNA, 24 bp, Homo sapiens
ttttcatgctctggaaaggactga

SEQ ID NO: 2633 - DNA, 113 bp, Homo sapiens
ctccaggcccgagagaccagcaaaccgtcgccctccgtcccgttgggccccacattcccccactgcctcacagcctcagtcacccggagacccgacgtccttggaggagcatg

SEQ ID NO: 2634 - DNA, 70 bp, Homo sapiens
gcaggccgacccactctgtaggatcgataggagcgctgtagagcagagacttgttcaactcattaaaggg

SEQ ID NO: 2635 - DNA, 25 bp, Homo sapiens
ccccccggagtacttcagaatgcaa

SEQ ID NO: 2636 - DNA, 170 bp, Homo sapiens
cgggacggaaaagcacgtctggctgcgagggcacacagggccggggaggaggattaggctggactgatcgcgggtcgcaggtgaccccgggaccagatgtccctcccctcatgagcgtgcaacagggagcagccccagccagccccaccgccgccgtctgcgtggatgga

SEQ ID NO: 2637 - DNA, 157 bp, Homo sapiens
gctggcgcgagcagagcctgcgccggcggagaggctcaggccccgcacgatccggggagagcgctggcgctgcggcgcatgcgcgctgcgcgccgcgccccgcccccacgccaagccctgtcggccgtggggaaagtacctggagcgtcggacgtca

SEQ ID NO: 2638 - DNA, 25 bp, Homo sapiens
caaagaatctactccttaaacctgg

SEQ ID NO: 2639 - DNA, 33 bp, Homo sapiens
tggccttcagacagcgccgcaccgcggctgggc

SEQ ID NO: 2640 - DNA, 78 bp, Homo sapiens
gagaagggcttcgaagataaactgagctccattcccctggcatgaaactttcagattcccctgcctctagaaattgtc

SEQ ID NO: 2641 - DNA, 58 bp, Homo sapiens
tgtcacccgggatgatgatgtactttgtgttactgaatattcccgtattgtacctttg

SEQ ID NO: 2642 - DNA, 262 bp, Homo sapiens
attcgggcatacatgcagaccaggtggttttcagcatgttcaaagaacaaagagatggttagaggttttataaacagggaagtgatactggttgctctttgagaaagtttatcggcactagtaaagtcttggggaggtagcaggttttgatcggtgagtgagggagtgagcaaaacacagtgggtgtttcagtagccgttagataaaactggcttctggatacagcaggaaatttcagcaactaggcttacagagaattcca

SEQ ID NO: 2643 - DNA, 24 bp, Homo sapiens
ggccggactcggggccactgtcca

SEQ ID NO: 2644 - DNA, 66 bp, Homo sapiens
taaccatcgttttcgcatgtgccatctgtcaaagtctggaagaaacctaagatgtgttgcattaaa

SEQ ID NO: 2645 - DNA, 25 bp, Homo sapiens
agctgtggaccttcgcgggttcccg

SEQ ID NO: 2646 - DNA, 44 bp, Homo sapiens
tgtacctgatgcatgcatcattggatttatcctccccatgtttc

SEQ ID NO: 2647 - DNA, 454 bp, Homo sapiens
ctggatggttcctacttgagcatagccagaccacagacctactatcaaaccaagcaaagacctaagtctgcagtccaggattcagcttcagaatcccttatagcatttaggaataattctttgaaaccagtaacccttcatcatcccaaagatgatctagataagataccatcagagaccacaacatgtaattgtgaatctccagggagaaaacctgcagtcccaacagagaaaatgccacaagaagaattgcacatgaaggaatgtccacatcttaagcctactcctagtcaatgctgtggtcatagacttgctgcagatcgtgttcatgacagccatcctacaaacatgacccctcaacatcctaagacacatccagaatcatgcagttattgtcggctttcttgggcatctctggtgcatggtggtggggcactgcaacccattgaaactt

SEQ ID NO: 2648 - DNA, 82 bp, Homo sapiens
agccagccgcagttgacagtgttacaattccaccagccccagtgttatctctccttgctgcatctgcagcaacgtcggatgc

SEQ ID NO: 2649 - DNA, 39 bp, Homo sapiens
ggcgcagccggcacttctgccggatcttgttggggcccc

SEQ ID NO: 2650 - DNA, 274 bp, Homo sapiens
tgttctccctgaccactttggttgatgtattttttccatgcgtctccacatctgttggggtagacgtgttgattgattgcattgcccaccagcaccctacagtcagatagttgtgatgctttaattctaacatacagcccgtaccacatccaggagatgtaaaaagtgtgtttgtgaatgtcttcacttgtactctaattcagacttgccaaagtatttgctatttactattatgggtaatactcttctctggcctagttcttacagagctact

SEQ ID NO: 2651 - DNA, 107 bp, Homo sapiens
atactgtctgtcccgttggcaggaggcgtacaggaagaggtgctgtaatggtttgtaccactacgatggaaagtggacatcggaggaagactggaattgatgtctgc

SEQ ID NO: 2652 - DNA, 24 bp, Homo sapiens
ccagcgcctgtccggcaacgtcag

SEQ ID NO: 2653 - DNA, 67 bp, Homo sapiens
gccacaccagtcggtaggggttgcagtactccagcctttccatgactttttggacagtggcgcttac

SEQ ID NO: 2654 - DNA, 79 bp, Homo sapiens
agttagctgggtatggtggcatgcacctgtagtcccagctactcgggaggctgaagcaagagaatcacttgaatctggg

SEQ ID NO: 2655 - DNA, 83 bp, Homo sapiens
aactactggaaatctggctgggcgtggtggctcaagcctgtaatcccagcactttgggaggctaaggagggcagatcacctga

SEQ ID NO: 2656 - DNA, 24 bp, Homo sapiens
gaaggacaaggttgcccttttgat

SEQ ID NO: 2657 - DNA, 132 bp, Homo sapiens
cgctccgagctcaagcgctggataggctcaccaacaaacccgtggagcccgagtcggagtttgtcatcaaaattcaggatatcaacgacaatgaacccaaatttttggatggcccatacacggcaggagttc

SEQ ID NO: 2658 - DNA, 81 bp, Homo sapiens
ttcaatcagaacgggcccatggggtttcagcgcaacggtgacagcggcagcagtcttcagggcactaaaggttaagaggga

SEQ ID NO: 2659 - DNA, 90 bp, Homo sapiens
gaaagatgagaacatccctggcacggtcgttcggaccagcactatcccagaggaacttgggcgcctggtgtatttattgacagacaaaac

SEQ ID NO: 2660 - DNA, 96 bp, Homo sapiens
cagagcacggacagctatccggtcgtgggcgggaagaagatggtcctgtctggccacaacttcctgcaggactccaaggtcattttcgtggagaaa

SEQ ID NO: 2661 - DNA, 31 bp, Homo sapiens
tgaagcagtcggacgcgtctccccaagaaag

SEQ ID NO: 2662 - DNA, 112 bp, Homo sapiens
gctgtgaagtcgtcagaacacatcaacgagggggagacggccatgctggtctgcaagtcagagtccgtgccacctgtcactgactgggcctggtacaagatcactgactctg

SEQ ID NO: 2663 - DNA, 55 bp, Homo sapiens
cgagtctccaacacgcccctgaggacggttgacggctcccccatgatgaaggcag

SEQ ID NO: 2664 - DNA, 137 bp, Homo sapiens
cacaccattgtgcagccaggacagggccacaatggggtccccctccactaggctgcccactgagctctcccagctattagccaggtggtccgccatgctccagcacttgatctgcccgtcggcatctgctgacagga

SEQ ID NO: 2665 - DNA, 47 bp, Homo sapiens
cctcccagcgtcgcgccctaacgacccgcaagtgtccgagggcgcct

SEQ ID NO: 2666 - DNA, 41 bp, Homo sapiens
gcctcggccgcctttgccgcctactgaagccggcgctgctc

SEQ ID NO: 2667 - DNA, 139 bp, Homo sapiens
gcatatattagcaggggtctgccccacggagcccccgagacgcggggccctgagcacctggggtttcctgagtttctagctcttgggaccacccggtttcacggatttcaagggtttgggcccactgagcccttgtggg

SEQ ID NO: 2668 - DNA, 31 bp, Homo sapiens
cccggcgcacgcagccctcggggatcttgat

SEQ ID NO: 2669 - DNA, 90 bp, Homo sapiens
gttgaggcgctggtggacgtcccagcagcgcttgcagaggagcaggacgccagacaacaccaccagcgtgccccccacgaacagcgacat

SEQ ID NO: 2670 - DNA, 41 bp, Homo sapiens
gcgtccagtggcattgtcccacgacgtcgtcagggctactg

SEQ ID NO: 2671 - DNA, 43 bp, Homo sapiens
caagtcgtcagacaaccgatcccgtgggtaccgtggtggctct

SEQ ID NO: 2672 - DNA, 40 bp, Homo sapiens
gggcctcgtactgcctcatggaaaatcctccggagccgcc

SEQ ID NO: 2673 - DNA, 58 bp, Homo sapiens
gcgcaaggagatgcgcgtcctgcacgtgctggagcagatccgggcctactgcgagacc

SEQ ID NO: 2674 - DNA, 87 bp, Homo sapiens
ccatcgagccgcagatctgccaggccacctgtgctgttatgaagctgtcctttgatgaggagtaccgccgtgccatgaacgagctag

SEQ ID NO: 2675 - DNA, 214 bp, Homo sapiens
agtccaccctgaagagcgtgctgagcgccctgtggaatctgtctgcacacagcacagagaacaaggcggccatctgccaggtggatggcgccctgggcttcctggtgagcaccctgacctacaagtgtcagagcaactcgctggccatcatcgagagcggcggcggcatcctccgcaatgtgtccagcctcgtcgccacccgtgaggactacag

SEQ ID NO: 2676 - DNA, 79 bp, Homo sapiens
cagagaccacgatgccctggcctgacagcccctgactccaggcctgcaggatgctcaggtctggttgggcctcgctgtt

SEQ ID NO: 2677 - DNA, 30 bp, Homo sapiens
gcccttcccgttggtgacaggcagcgggaa

SEQ ID NO: 2678 - DNA, 33 bp, Homo sapiens
tcatgttgatgtcgttggcaccgtccccgatgg

SEQ ID NO: 2679 - DNA, 102 bp, Homo sapiens
ctcgtccccaaagaggtcggcgtggctcagggcccgcttcttcagcttgggggcgtcctgggaggcgccctcgtctagtgagcgggctttccgctccactag

SEQ ID NO: 2680 - DNA, 57 bp, Homo sapiens
cactcattcacagtaacggttctgaccagtcctccaggtcgcacgtggatgcgacag

SEQ ID NO: 2681 - DNA, 117 bp, Homo sapiens
cttctcggattcctccaggaacagtggagaagacaaggcaggaatcagctctcagaattccacaccaaggccttctgggctcccccggtcttcccacggacgagacacaagtgaccc

SEQ ID NO: 2682 - DNA, 73 bp, Homo sapiens
ttcaccaggaggcagacatggtggccctggatggagcggctgtacatggaggcgcaggagtccactcgctcca

SEQ ID NO: 2683 - DNA, 26 bp, Homo sapiens
tgcagactgccccggatgtcacaggt

SEQ ID NO: 2684 - DNA, 99 bp, Homo sapiens
ggtgcttgggacgccgctgctcctcctcgtggaagacggccctgggcctctcgtcctctgactcgctgtccgagagtggctcattgatccaggcgtcca

SEQ ID NO: 2685 - DNA, 25 bp, Homo sapiens
cccgcccgcgctgcagaagcttcta

SEQ ID NO: 2686 - DNA, 55 bp, Homo sapiens
tcttggggcccctcatgcccagctcggccgccatctcggccggctgccgggacag

SEQ ID NO: 2687 - DNA, 336 bp, Homo sapiens
cgcaccacgcggtaatacagggcgtccccgctctctgcgcagggtgagctgtctaggaggcggaagctgtggccggggtggcagggcccggggtggccccccatgagccgggcacggagccgggcatagatggtacggaggccctgcagctgccgcgcagccagtgcagtgtgcacagcctccgggctgtgcagatcgcggagggagaggcccagtggggcgtcagccgggccaaaggtcagctctgcagggagacaggctggtcccactgcagcctggctcttgtccacactgtgggaccccagaaagggtctccgaggcggctgtacttggatg

SEQ ID NO: 2688 - DNA, 102 bp, Homo sapiens
ctatggcgttggcctccttgtgacattcgtggcactggccctgatgcagcgtggccagcccgctctcctctacctggtgccctgcacgctggtgacgagctg

SEQ ID NO: 2689 - DNA, 52 bp, Homo sapiens
caacccaacccacgaggaccatcgggggcagagtcgttggagactgaagagg

SEQ ID NO: 2690 - DNA, 25 bp, Homo sapiens
ccacttcctcaaagatcacgcagtc

SEQ ID NO: 2691 - DNA, 49 bp, Homo sapiens
ggagagcctcgcattgtttgggactatcctggaactaccctggttcaaa

SEQ ID NO: 2692 - DNA, 26 bp, Homo sapiens
aggaagcgggcgaggtgctggagaac

SEQ ID NO: 2693 - DNA, 39 bp, Homo sapiens
ggaggaggcaagtttaactaccagggaaccaagcgctgg

SEQ ID NO: 2694 - DNA, 73 bp, Homo sapiens
gcggacgctccggcgcatgcagcagatggtgggccagctgggcatcctgacgccgtccctcacattgcccttc

SEQ ID NO: 2695 - DNA, 139 bp, Homo sapiens
aaacccacccgcaagatctccaagatccccttcaaggtgctggacgcgcccgagctgcaggacgacttctacctcaatctggtggactggtcgtccctcaatgtgctcagcgtggggctaggcacctgcgtgtacctgt

SEQ ID NO: 2696 - DNA, 60 bp, Homo sapiens
tgggagctcctaaaccccgccacttccggaagactcctggcccgggattatgccaagaaa

SEQ ID NO: 2697 - DNA, 26 bp, Homo sapiens
tgccggcacttccgcacgatcgcaaa

SEQ ID NO: 2698 - DNA, 94 bp, Homo sapiens
atggggatgcaggcgtggtcctcctccaggtccttcaggcagatctccaggtgcagctcgccggcgcccgcgatgatatgctctcccgactcct

SEQ ID NO: 2699 - DNA, 93 bp, Homo sapiens
attagccccatgagcgagaggaagcccccgtaggaccagccatggatggcaactcggctcaggtcgatgaagccatacttctcggccacgaac

SEQ ID NO: 2700 - DNA, 66 bp, Homo sapiens
atcaagggaaacgatccttattgcctcaccatttcccacgtgaagtctgtattgacattctcatag

SEQ ID NO: 2701 - DNA, 314 bp, Homo sapiens
tctacagaaagttggagtggcgtctggtctttgacagagcaggggtttttgaccggctccagaataggcaaggggagagactgggggcctgcagacccctcggtgcactccactgggtagttggtgctggtttctggagctgcgggggtatcagggaggccagtggaggttgcatctggggccacttcgggaagcccaggaggtgggctgcttggcagctctggtgggctggcaatctcccccgatggcggccagctcatctcctcaggctcctggcagccaccggggacaggctcgggcaccaagctggcctg

SEQ ID NO: 2702 - DNA, 263 bp, Homo sapiens
aggtgtgttctgggccacatattccaccatgtggtccagggcctcgcgggcgctggcgacacgctcacggctctgggccagaatgctgctggacaggtcctggaaggagtggatgctggaaaacgtggcctggaggtcctccacctggcggcgggcctgctgcacctggtccttcacattggtggggaggccctgaatgctggaccccagggaggtacaggtggcctgcagttgctgggcaatgtcccggaacatggtgagcg

SEQ ID NO: 2703 - DNA, 60 bp, Homo sapiens
ggctccaggacagcgtgatgctggtctccgacctggcctcggcccgcaggttcatgggct

SEQ ID NO: 2704 - DNA, 242 bp, Homo sapiens
ttcaccgtgatctgagcaaccgcctcaatgacgcccaggctggacatggccacgcaggtgtagttggccgagtccttgacatctgtgagttccagcacgttccgacccacgggcatgtcatcctcgggggtcaggtcctcggccccctgcatccacttcacgtatggcatgggcgagcccacggccacgcaggtgatgttcacgttgccccctggcatgatctcgtggctcatgggcaggat

SEQ ID NO: 2705 - DNA, 301 bp, Homo sapiens
ccctggtcgtatcagccttctttgtcctgaaccacctgtggctctgggcccaggcctgctgcagccacagacggccggtgaagacgtctacctgccagaaggcccaggtccgcaccttcacgtggcacaacgacctgtgtgccatctgcctggatgagtatgaggagggcgaccaactcaagatcctgccctgctcccacacctaccactgcaaatgcattgacccctggttctcccaagccccccggcgctcctgccccgtgtgcaaacagtcggtggccgccacagaagacagctttga

SEQ ID NO: 2706 - DNA, 129 bp, Homo sapiens
ccggatgcgatggagctgcgcgagctgacgccctgggctgggcggcccccaggtccgcgccgtcgggcggggccccggcggcggcgcgcgcgtgcgcggttgggggcgcggccttgcgggctgcgcgag

SEQ ID NO: 2707 - DNA, 27 bp, Homo sapiens
tgaccgcgtctgcctgtggatacacct

SEQ ID NO: 2708 - DNA, 123 bp, Homo sapiens
ccggcctcagcacgtcggggatgagaatctccaccagcgcctggtagaggatgtggtcgcagctcctcatccacctgaggatggggtcgcactgacacagggagataagcttgtccttgggca

SEQ ID NO: 2709 - DNA, 136 bp, Homo sapiens
ctggcatcactggcatcggacgacatctccaggtcgtcctccaggtcgtggatgcgcagctcgctcgccttcctgcggccacgtttctccttctcctcctcatcctcgtcctggtcctgatccttgagccgccgct

SEQ ID NO: 2710 - DNA, 25 bp, Homo sapiens
ctggggtgggtactggtgaggaggg

SEQ ID NO: 2711 - DNA, 79 bp, Homo sapiens
ggccagcccctggcgcaactcgtgcacgtccacgcggccatccttgttactgtccagctcctcgaacaggcgaccccag

SEQ ID NO: 2712 - DNA, 24 bp, Homo sapiens
taaccctcaaagcacttcttaaga

SEQ ID NO: 2713 - DNA, 136 bp, Homo sapiens
cgggagagcagattcccacggccagggtggtggggtggtgcctggaggccgtcgtggaggagcagatggccagcgtcacctggatgtgtaccatgtagatgccatcacgatggatacgtagctgccccttgtccag

SEQ ID NO: 2714 - DNA, 85 bp, Homo sapiens
ggccgcagagaacggaggtagctcttcaggtctccgtgagccatcagctccatcaccaccagcgtgggctggcccttggacacca

SEQ ID NO: 2715 - DNA, 120 bp, Homo sapiens
tccagagcctgatctgcaggcagctgggcagcgccaacggccaggcggaagacggaggcagctccacaggcccgcccaggagggctgagaccttcgcgggctacgactgcacaaacagcc

SEQ ID NO: 2716 - DNA, 107 bp, Homo sapiens
ggacatgcccgtcaagaaccagtactccgagctgctcaagatgtcctcgccgtgcgagaagctgatccgcagggacatcgcccgcacctacccggaacatgagttct

SEQ ID NO: 2717 - DNA, 130 bp, Homo sapiens
caacaggacagtttccctacaagaactgcaagacggactttgaggtcctcaccaaagtcctacaggaagagcccccgcttctgcccggacacatgggcttctcgggggacttccagtccttcgtcaaaga

SEQ ID NO: 2718 - DNA, 303 bp, Homo sapiens
ctctttctgaggatcccgtcatgggggaaggtccttgagatgatgctcagctgtggggcgggcctctaagatgccccatactttgggggtctcagaaatggaacccccgttgtacaggggttgggtgggggttgcaggactccactcacaagcctcctgatgtcaaggacaggcggacagggctggcctcccccagtccccaagccccactgtgccttgttgtctgctggggggccatagctggcactgcccaccgtaaaggccctcgcacattttcccccttcctgtacacctcggggccag

SEQ ID NO: 2719 - DNA, 177 bp, Homo sapiens
aatctctgcgcctggtggtgaacggggcctccgaaccgtcgcgctggcgagtggtacagctgcgagaggagtgccacgtttttgttctggttggggttggctgcaaacttcactgtgatgggctcagaggaacctgggggtttatgaccattgaaactggtaattgcctcttctgcc

SEQ ID NO: 2720 - DNA, 24 bp, Homo sapiens
gcgcagtttcttgtcagttccccc

SEQ ID NO: 2721 - DNA, 27 bp, Homo sapiens
taggtgtagtgagccagacgaggcagc

SEQ ID NO: 2722 - DNA, 69 bp, Homo sapiens
gttactggttgcgtcgggtcacgtgggcgcgcaggcgcagcgcggtgcagcccgttcgctcacacaaag

SEQ ID NO: 2723 - DNA, 34 bp, Homo sapiens
ggcctcaaatgatccccccttcttggcttcccaa

SEQ ID NO: 2724 - DNA, 29 bp, Homo sapiens
ttatatgtttagtagagtcggagtttcac

SEQ ID NO: 2725 - DNA, 155 bp, Homo sapiens
tggcaggcctccagtacaggtgggcgcggctgcgggcatgcgctgtcgtccagcgccttctcctccgcggcagagacgcggcgctggcacacgaccgagcggctgcgcacgcctgcatcgcagctgcggctgcagagcgaccagttccctacaac

SEQ ID NO: 2726 - DNA, 120 bp, Homo sapiens
gagagaagtccactgaatacgctcacttgttcgaagtctttggcatggaccctcatctcactcagccaatgggaaggcacgctggcaagaggccctatcaccgccgcgactatggggtag

SEQ ID NO: 2727 - DNA, 66 bp, Homo sapiens
atacacctgagtgaggcaccccatgtaggagatgtctttgctccgtgcctggatgctcactagcat

SEQ ID NO: 2728 - DNA, 211 bp, Homo sapiens
gtggctgctgtcgtctggttgaaagacagctcctctccattggtgccaaggaagcgggcggagtggctgtagtcacccgtggcttcgtccagccaggcagctgcattctggcaggagtaggtgaagttctggcgagctgtggcactcagcagtttcaggaagttcagctgcacgacattcactggggacccgtcggcgtccacgtaggaga

SEQ ID NO: 2729 - DNA, 87 bp, Homo sapiens
gtgctcaccccaagagccggaagcagaaccacctgcccaaagtgctccaccccagcaaccctcacattagcagtggctccactgtgg

SEQ ID NO: 2730 - DNA, 50 bp, Homo sapiens
catctctgggatgttatcatcgacttcctcatcgtcatctgcctccttca

SEQ ID NO: 2731 - DNA, 67 bp, Homo sapiens
ttctatgccggctgagcgagaaaaagaggaatatgaaacaatctggggaaatggccatacatggtgg

SEQ ID NO: 2732 - DNA, 24 bp, Homo sapiens
gtgaccattaggcccggggctgag

SEQ ID NO: 2733 - DNA, 68 bp, Homo sapiens
ctggagggacgcggatgggcccaggttgttgagcagctgcaggatgttgggctcggggaggagtccct

SEQ ID NO: 2734 - DNA, 168 bp, Homo sapiens
ctcccagccggtaccatgggcctgcccgctggatgcccccacgctgggcccagggtgcccctgagctggagcaggaacgccggcaccggcagattgtgtcctggttcgccgaccacccccgggccccctttggcctacaccggctggtggagcttgggcagagctcag

SEQ ID NO: 2735 - DNA, 45 bp, Homo sapiens
tgctgtacctggaccctcactactgccagcccactgtggatgtca

SEQ ID NO: 2736 - DNA, 99 bp, Homo sapiens
cctggagaggaatgacggctcggccgagaggccttacttcatgtcttccaccctcaagaaactcttgaacaagaccaacaagaaggcagcggagtcctg

SEQ ID NO: 2737 - DNA, 84 bp, Homo sapiens
cgagacgtgcctggcttcgccatcgggggcctgagcgggggtgagagcaagtcgcagttctggcggatggtggcgctgagcacc

SEQ ID NO: 2738 - DNA, 26 bp, Homo sapiens
tctgggcgacgttgctggcagaggaa

SEQ ID NO: 2739 - DNA, 108 bp, Homo sapiens
tcacgctgacaagcagagccacatcctatgggccctcacaggccacgtgcagcggcagaggcgggagatggtggcacagcagcatcggctgcgacagatccaggagag

SEQ ID NO: 2740 - DNA, 103 bp, Homo sapiens
ggtcgtcggcgagcctccggccatcctcagcaggcacaacacgttcgtcctccaggtcacacttgttccccaccaggatgacctgggcgttgtcccaggagta

SEQ ID NO: 2741 - DNA, 82 bp, Homo sapiens
tgggagagcagcgcgagcacggtcagcagcaccaggatgaccacgaggatgagggagagcgtcaggatgagggggtccaggt

SEQ ID NO: 2742 - DNA, 89 bp, Homo sapiens
cacttgcatcgcccgcaaggcgcgctccagctggtccttggcctcggcgtgccgccgctcctccttcttgagacgctcctgcgcctcgg

SEQ ID NO: 2743 - DNA, 24 bp, Homo sapiens
tcccctggtttttgtactgctctt

SEQ ID NO: 2744 - DNA, 25 bp, Homo sapiens
caagttaacaaaggtttcttgcatc

SEQ ID NO: 2745 - DNA, 39 bp, Homo sapiens
ggcgctcaggttacgtccggaatcctctcctacggcaaa

SEQ ID NO: 2746 - DNA, 86 bp, Homo sapiens
gaggccgcacatgctgaagatcatgcccagcaggttcatgtagtccggcgtcgggtcgtccaaggccgggttacattcgctcggcg

SEQ ID NO: 2747 - DNA, 31 bp, Homo sapiens
agcggcggcaactcgcgctgcggcttctcca

SEQ ID NO: 2748 - DNA, 34 bp, Homo sapiens
gcagtccagctctccaaggggcgtgagagtgttc

SEQ ID NO: 2749 - DNA, 425 bp, Homo sapiens
ggaacagcccttctaccacgacgactcatacacagctacgggatacggccgggcccctggtggcctctctctacacgactacaaactcctgaaaccgagcctggcggtcaacctggccgacccctaccggagtctcaaagcgcctggggctcgcggacccggcccagagggcggcggtggcggcagctacttttctggtcagggctcggacaccggcgcgtctctcaagctcgcctcttcggagctggaacgcctgattgtccccaacagcaacggcgtgatcacgacgacgcctacacccccgggacagtacttttacccccgcgggggtggcagcggtggaggtgcagggggcgcagggggcggcgtcaccgaggagcaggagggcttcgccgacggctttgtcaaagccctggacgatctgc

SEQ ID NO: 2750 - DNA, 27 bp, Homo sapiens
aagaagcgcagctccctcttccggaag

SEQ ID NO: 2751 - DNA, 35 bp, Homo sapiens
tgcctgcagctcggccgcttgaaggaccaggacaa

SEQ ID NO: 2752 - DNA, 24 bp, Homo sapiens
gcagagctggccgcgccaaataat

SEQ ID NO: 2753 - DNA, 27 bp, Homo sapiens
ccaagcgccccaagtccatcgatgaca

SEQ ID NO: 2754 - DNA, 130 bp, Homo sapiens
taggctggctgttgggcatgtcggtaggggggccttgttccggactccatgtgcccgtcttctggaacatctcctgggcacgctgggtcacccaggacgggctctccttgaggccgctttcgtgagccat

SEQ ID NO: 2755 - DNA, 84 bp, Homo sapiens
ggaggggagggcgttctggccaggtcccccttcctgcgttggggacgggggctccatgcgctggaacatgaggggtgtccggtc

SEQ ID NO: 2756 - DNA, 45 bp, Homo sapiens
ccgcagcttcttcctcttagtcattttatcttccccttgagaaat

SEQ ID NO: 2757 - DNA, 53 bp, Homo sapiens
gctccctgaaggttctggcggacagcgagcgatatacgtggatcgtgctgtga

SEQ ID NO: 2758 - DNA, 72 bp, Homo sapiens
cctgctgggtaccatggaccgtcagggagacctggccacctttgctgcctggggctgcgctctgcaccacca

SEQ ID NO: 2759 - DNA, 29 bp, Homo sapiens
ggaggtgaagctgcatgcgggcggctccg

SEQ ID NO: 2760 - DNA, 25 bp, Homo sapiens
aggccaataacccctcggagcagga

SEQ ID NO: 2761 - DNA, 49 bp, Homo sapiens
tgcttcggaggaacccagagcggaggctgggatctagcgagagagatgc

SEQ ID NO: 2762 - DNA, 27 bp, Homo sapiens
ggagcccgccggcgagatctggtacaa

SEQ ID NO: 2763 - DNA, 69 bp, Homo sapiens
ggcagcggtccctcgggctgaggctcccaggctcctgcaaagaggttggccaggtaattctctaaatac

SEQ ID NO: 2764 - DNA, 106 bp, Homo sapiens
agtcgtaagtgaggtcgccactctgcctgcaggtgcccccgttacggcatggtgagggtgcacagggcaccgcggggttctcacatagtggccctgtgtagccagc

SEQ ID NO: 2765 - DNA, 127 bp, Homo sapiens
cggttccggttgtgatccatggtcttcagatgcttctggatgatcccaaactgcatgggaatgaagaggtcgcaggctgcacaatgggctgcctccaccttcttcacaaaatgctccatggcaattt

SEQ ID NO: 2766 - DNA, 77 bp, Homo sapiens
tttgggtgctcagcgactccacgaggcgggacagcactttctgctcctcacgcagagcggccacctcgcactgcagc

SEQ ID NO: 2767 - DNA, 27 bp, Homo sapiens
cttggtcagcatctatggaacccacca

SEQ ID NO: 2768 - DNA, 205 bp, Homo sapiens
ggaagtcgtcctgcatgaagcggggcgggaagcggttgaagttgtgggggtgcggaggctggttgaactgcgggtgctgctggtggggcgggaagggcccccggaagtgtgggggccgctgcatgcggaagggtggctcgcgctggcccccgccccagggcggctgctcgtgctggctgttccaggggccctcgaactggctgtt

SEQ ID NO: 2769 - DNA, 58 bp, Homo sapiens
ctgtttccaggagagcaaccaccacgtaggctgtcagcgggacagtgccgtggatccc

SEQ ID NO: 2770 - DNA, 59 bp, Homo sapiens
agagacccaaggatctgggtgctggaatggctgcggaggcgccgaagcagggggtgagc

SEQ ID NO: 2771 - DNA, 133 bp, Homo sapiens
cttggaagtgcctgtgagcttcccgctgttcctgcagcaccccttccgccggcacctctgcttctctgcagccaccagggaggcacagcatgcctggaggctggccctgcagggtggcatccggcttcagggc

SEQ ID NO: 2772 - DNA, 24 bp, Homo sapiens
gcaccatgaaacgccattcttcac

SEQ ID NO: 2773 - DNA, 370 bp, Homo sapiens
acagctacaatggcagcgtggggcggccgctgggcagcgggccgggcgccctgggacgagaccctccggaccctgaggccggccaccccccacaacccccgcacagcccgggcctccaggtggtagtggccaagagtgagccagcccggccctcacccggcagcccccgggggcagccccaggaccaggacgatgacgaggatgatgaggaagatgaggccggcaggcagagagcctcggggaaaccctcaaatgtgggccaccgcctgggccaccggcgggcgctcttcgagaagcggaagcgcctcagcgactatgccctcattttcggcatgtttggcatcgtcgtcatggtgacggagaccgagct

SEQ ID NO: 2774 - DNA, 32 bp, Homo sapiens
gccctcctcccacacgagagcccattttccag

SEQ ID NO: 2775 - DNA, 78 bp, Homo sapiens
tacgtagagacaccggaatcctagccctgacctcagccctgtggtcgccctcgcctccaccgccagtgtttattatta

SEQ ID NO: 2776 - DNA, 136 bp, Homo sapiens
attctgcaagacccctctgccatgccagggcacgcccattccagctggagtcgtggggctgggcacaggggaatttttccagagctgagcctgacgtctgctctgaagaatgcttagaaggttcccagacaccaga

SEQ ID NO: 2777 - DNA, 134 bp, Homo sapiens
gggatgcgccgagggagatgggaaacggggcggatggcgcccagcccagccctaactgccagctggctggggttgcgccccactgcgctgctgaccttcctgcagttccagacacctcccacaataaagagctc

SEQ ID NO: 2778 - DNA, 72 bp, Homo sapiens
gctctggccctgtccggacgcgccgagggcagccagggtgagcagaagaacgcaggcggtgtcggggaccat

SEQ ID NO: 2779 - DNA, 30 bp, Homo sapiens
cggagcgcagggcggtccagcccagcgcgc

SEQ ID NO: 2780 - DNA, 159 bp, Homo sapiens
tgctgatccgaaacctggtggcccacggccaggccttctcgaagcccatcctggacctgggggctgaggcactcatcatgcaggcccgatctgcccaccgtgactgtgaggacgtggccaaggccgccctgcgggacctgggttgtcatgtcgagctcc

SEQ ID NO: 2781 - DNA, 30 bp, Homo sapiens
gaggggcgctgggcgcactggtcggggcgt

SEQ ID NO: 2782 - DNA, 147 bp, Homo sapiens
gccctcgctccagctgaacgcctccattgctgcttgttctggagacccccgcccccgcaccttccagacttagcagaagaacaaactgaagaacagacccagccagagaagcagggattccagaagctgcccattaagggagaagga

SEQ ID NO: 2783 - DNA, 171 bp, Homo sapiens
gccgcgaacgcagggtcatcactgcctcacaggtgctctgcttcaactgcatctggatggcgctgaacttgccgtgaatggcgccgaccatgcgctcaatctccttaggggagacaggcctcatcctgctctgctcctggaggaggttggtgacgtgcgtggtgaactcac

SEQ ID NO: 2784 - DNA, 42 bp, Homo sapiens
gcctttaatcggtcctcgcacctcaccacagataagataact

SEQ ID NO: 2785 - DNA, 72 bp, Homo sapiens
ccaaacgtaaacgaaagaacagcactggcagtggccactctgcccaggagctgccgaccatcaggacgcctg

SEQ ID NO: 2786 - DNA, 76 bp, Homo sapiens
ttttggagactggtggtcttaggctcttggctctggatcgacttctcatcctctctccgctttctcaggccagtat

SEQ ID NO: 2787 - DNA, 69 bp, Homo sapiens
ccgcacggctttcaggatctgctgattcaaagcagctctttgattctgcaatttactccggccggtttg

SEQ ID NO: 2788 - DNA, 24 bp, Homo sapiens
ccgcccgggagcggatgttcaatg

SEQ ID NO: 2789 - DNA, 162 bp, Homo sapiens
accacctccttcatgctcctctgtgatcacctctccaagtcccggtgtcaggagccttctctgtggccgccctggagagacttgagcctgggacgtgacgtgctgggctgtgaagctttctgagaagggaaacctgtggcctgacctgcctgaatgctgcac

SEQ ID NO: 2790 - DNA, 78 bp, Homo sapiens
gagaagctgcaccaaggcatcacagtctcagaccctccctttgacacccagccccggcccgatgacagcttttcctga

SEQ ID NO: 2791 - DNA, 73 bp, Homo sapiens
ccatccacgcccacatctctctgcctcctctcctgggctacagtgggccgctctgcctcgctcccgcccgcct

SEQ ID NO: 2792 - DNA, 242 bp, Homo sapiens
cactttttcctctgagcgcgggaggcgttactcactcttcctccttcccctcctcgccgactcccgggctctgggcccctgggggagggaagaggcctcctatctactcctctgccccagtcccctccttgcgtcagtcccagtgagggataagcgcctggcggaaggcgcagggaggtgtttctctgcttcaggagtgcccgccggcccttgcagctgctggaagacccatttatctcatg

SEQ ID NO: 2793 - DNA, 69 bp, Homo sapiens
cctgcgattacatccgggagttgcgccagaccaaccagcgcatgcaggagaccttcaaagaggccgagc

SEQ ID NO: 2794 - DNA, 77 bp, Homo sapiens
ggctcgttgaccaatctgtcacgctttgggttgcgtggacgcaggtgcatgatgtcactctcggccttttcatatgc

SEQ ID NO: 2795 - DNA, 57 bp, Homo sapiens
gagacccaggaacaggtccgcctgctcatcaagggaaactcggccagcaagacccgc

SEQ ID NO: 2796 - DNA, 78 bp, Homo sapiens
agtatgtgggctcgcgccccatcaagcttcgcaagagcatgtggaaggaccggaatctggacgtggtccgcaagaagc

SEQ ID NO: 2797 - DNA, 87 bp, Homo sapiens
gggacagggctaaaaagccagatccaggcctgaagaaacatcaggaggagccagagaaaccctcaaggaatcctgagagagaactgg

SEQ ID NO: 2798 - DNA, 298 bp, Homo sapiens
gtggtcaccactcctgttaaggccgaggtgtcccctcacggggctccagctctgagcaacgggccacagacacaggctcagctactgcagcccctgcaggccttgcaaacccagctcctgccccaggcactaccgccaccacagccacagctgcagccaccgccgtcaccacagcagatgcctcccctggaaaaagcccggattgcgggcgtgggttccttgccgctgtctggggtagaggagaagatgttcagcctcctcaagagagccaaagtgcagctattcaagatcgatcagc

SEQ ID NO: 2799 - DNA, 25 bp, Homo sapiens
ggagaggtcctgccaggaacatctg

SEQ ID NO: 2800 - DNA, 58 bp, Homo sapiens
gttctgggaaatgggccgcagatgcatgaagttgcagaagccacctcgggtacattcc

SEQ ID NO: 2801 - DNA, 28 bp, Homo sapiens
ctgcagatcccgcatcccatctccactg

SEQ ID NO: 2802 - DNA, 72 bp, Homo sapiens
attccccaccagctctgatggcctctctcccttctcggagaccttcatccctgactccagcaagggccttgg

SEQ ID NO: 2803 - DNA, 65 bp, Homo sapiens
ccagcagcgagagcgcagggttcagtgaggtgtactccgcatccaccaggagccgcacgtgctgg

SEQ ID NO: 2804 - DNA, 86 bp, Homo sapiens
acctgcgtgcggagcagaaggaacagaggcacacgctgcgccactaccagcatgtggccgccgtggatcccgagaaggcacagcag

SEQ ID NO: 2805 - DNA, 190 bp, Homo sapiens
ccttgtcctcttccgccggagtcacctcccttctccgcccaaggacacgcgtagtcctcctctgtccaggaaccccaggccccacccgctgcgcgcagcgtgacagctggggacgcggcggggctggggctggggctggggctgggttgcggggagtcctgctcctcggattcgtccaccacggaggagg

SEQ ID NO: 2806 - DNA, 93 bp, Homo sapiens
tcggcgctttaggcgtctgtcacagacctatctgcgggtcgccttcacccagcatctcagaaactgcgcgcgggatgaacattcgggtgtttc

SEQ ID NO: 2807 - DNA, 110 bp, Homo sapiens
cactgggtctcaaccctttttctgtagggtgtctgaagcttggcagtcatctgtgaactcaagcagagctgctctgaagagatgggctggagtctagaggaaaatctggc

SEQ ID NO: 2808 - DNA, 25 bp, Homo sapiens
gggtgagacccgcccagctggcacc

SEQ ID NO: 2809 - DNA, 109 bp, Homo sapiens
agctgtcgcagaaggtaggctttcggaaggtgacctcatggaaggtgtgcaggaaggccaggcccaacttggagcagatggcgctggcccggagcaggtaccctgtcag

SEQ ID NO: 2810 - DNA, 98 bp, Homo sapiens
gtcttgcaagagtagggctcagctcctccccttgcccaggactccagcttctcagcccctagggagctggggcctcctcggtgcttgggaaggaaaga

SEQ ID NO: 2811 - DNA, 26 bp, Homo sapiens
agagacaggtgccatggtgtcctcca

SEQ ID NO: 2812 - DNA, 275 bp, Homo sapiens
ggtgaccgagctcctggcaggcatgcccgaccccaccagcgacgaggtgcacggcgagcagccggccgggccgggcggagacgcagacggcgagggtgccagcgagggcgctggagacgccgcggagggcgctggagacgaggaggaggcggtgcacgaggccgggccgggcggtgccgacggggcggtggccgtgaccgatgggggccccttccggcccgaaggggctggcggtctcggggacatgggggacacgacgcctgcggaaccgccca

SEQ ID NO: 2813 - DNA, 142 bp, Homo sapiens
ctgtttcacatgtacgtgggtgtccgggctggcggaggcattggggacgagatcgaggaccccgcgggtgacgaatacgagctctacagggtggtcttcgacatcaccttcttcttcttcgtcatcgtcatcctgttggcca

SEQ ID NO: 2814 - DNA, 38 bp, Homo sapiens
gctgggagcagtaggatcatccactgggcgtgtctcca

SEQ ID NO: 2815 - DNA, 268 bp, Homo sapiens
ctctctgcagtcctccggggtgggtgggtgggcagggaggggctggggcaggctctctcctctctctctttgtgggttggccaggaggttcccccgaccaggttggggagacttggggccagcgcttctggtctggtaaatatgtatgatgtgttgtgcttttttaaccaaggaggggccagtggattcccacagcacaaccggtcccttccatgccctgggatgcctcaccacacccaggtctcttcctttgctctgaggtcccttc

SEQ ID NO: 2816 - DNA, 36 bp, Homo sapiens
tgccagcctcagctcgtaggagttcatggttccaga

SEQ ID NO: 2817 - DNA, 71 bp, Homo sapiens
tgtgtgtgcccgtgatggaatacgcgtgtccctttaccaggccctcttctgtgcggtactcaccccgatca

SEQ ID NO: 2818 - DNA, 55 bp, Homo sapiens
ggaaggccgagaggcgatgggcaaagtcaaagaggtgctggccattggcgtaaac

SEQ ID NO: 2819 - DNA, 102 bp, Homo sapiens
gttgaaggtctcctggtatcgagtgatgatgtcacggaggtaccagctgatccgggccacatcatctcctttgggctgcaggatgtccgaagccatgtccat

SEQ ID NO: 2820 - DNA, 74 bp, Homo sapiens
aggcacggttgtcctgttttcctccaccacccagccgtccccaccgtgttgcaccatccactttcggaggcctt

SEQ ID NO: 2821 - DNA, 326 bp, Homo sapiens
gtttggagtcaacgtcaccatcccatcctggaagaagatgtggacctggcccacagcctccgttttgccatggcagatctggacttcggcaactacacggtaccaggggatggtattctgtagtcctgggcagcgggaagagagctcatagacaccaggagaggtggtggcaccacgggccccatcaaaggtggtgaggttggcacccacagacaggacacagagaccacgggtggcccagcagttccgggcttcagccttgacctcacatacacggcctggtgggcagccagctgcctggcatgtcaggccagagcttgaggaac

SEQ ID NO: 2822 - DNA, 31 bp, Homo sapiens
tagggatgtgtccatagacctctcccaagag

SEQ ID NO: 2823 - DNA, 170 bp, Homo sapiens
tggaggcagcagcgtgcccccttccccctactcgaccccgtcctacctctcagtgccactgcctgccgagccctccccgggggcgcgggcgccgtgggagccgacgccgtccgcgccccccgctcggtggggacacggcgcccggcggcgctgcgacctggcgctgctag

SEQ ID NO: 2824 - DNA, 104 bp, Homo sapiens
tcactggggcttgtgtggattaaaacctgaatctccaaccgcccaacagcccaggcctgggcgggaggtggagtcttccaaatgcgagtctgggcacaaaggtg

SEQ ID NO: 2825 - DNA, 65 bp, Homo sapiens
cctgcagaggagcccgccaatgagctgcccatgaatgagattgaggcgtggaaggctgcggaaaa

SEQ ID NO: 2826 - DNA, 50 bp, Homo sapiens
accagctccacctcggggatcttaagctgcacagcggtggactcagcctt

SEQ ID NO: 2827 - DNA, 27 bp, Homo sapiens
tgtacgccccagttagtggctggtctc

SEQ ID NO: 2828 - DNA, 44 bp, Homo sapiens
gcgggcgcagcgggaacagcgggcggcgcgcatgacctgtccag

SEQ ID NO: 2829 - DNA, 59 bp, Homo sapiens
cgaatgccggaaccggtccttctgcggtgcccacgccgtgtgccagaacctgcccggct

SEQ ID NO: 2830 - DNA, 24 bp, Homo sapiens
aggcccatcctggtaaaacttttg

SEQ ID NO: 2831 - DNA, 37 bp, Homo sapiens
ctcttctccaggccgaagacatgacggggagcaggcc

SEQ ID NO: 2832 - DNA, 44 bp, Homo sapiens
ccggggaaaaatcgtcatcatggacccagtctaccagggatatg

SEQ ID NO: 2833 - DNA, 76 bp, Homo sapiens
cagaagagttcaacccagaccgtttcctggatgcagatggacggttcaggaagcatgaggcgttcctgcccttctc

SEQ ID NO: 2834 - DNA, 46 bp, Homo sapiens
acagcgcccagagcccggatagagagacacggcctcactggctcag

SEQ ID NO: 2835 - DNA, 75 bp, Homo sapiens
tgccatctgcacgaggtcagagctggaggatttcctgagtgaagcggtctgcatgaaggaatttgaccatcccaa

SEQ ID NO: 2836 - DNA, 130 bp, Homo sapiens
gacagccctagtcttcgtgagcttcaacagcctctgctggagggcacagaatgtgagacccctgcccagaagcctggcaggcatgagctggggtcccccttaagagagatagcctttgccgagtccctga

SEQ ID NO: 2837 - DNA, 61 bp, Homo sapiens
agctcttggagtaacgcctctgcagcgattcccggtagaaacggaagacgtgttgcgaagc

SEQ ID NO: 2838 - DNA, 25 bp, Homo sapiens
ggctgtgtcccgaggctgctcctcc

SEQ ID NO: 2839 - DNA, 26 bp, Homo sapiens
atttcccctctaaacacatcttacag

SEQ ID NO: 2840 - DNA, 53 bp, Homo sapiens
cctgtcccaagcaaacctgggcagacccagccttgaccaagaataggagggga

SEQ ID NO: 2841 - DNA, 80 bp, Homo sapiens
ccggaccgagagaatcctcagtgacctcctgcccttctgcagaccaggccccgagggccagctcgctgccacggcccttc

SEQ ID NO: 2842 - DNA, 125 bp, Homo sapiens
tttagctcgatggtcctcctccttggggcaccggcccccctcccaccacttgcgcttcaggatctccagccggttgttctcctgaagctgcaggatggccagtgtgatctcatcccggaacgggg

SEQ ID NO: 2843 - DNA, 117 bp, Homo sapiens
gcgcctcccagtggtcggtactcacatgtagctgcggtgcttggtggcagcgtcctgttggtggctggggggtacagcggccggccccgtggggacttgatggcgtacaaggtgccc

SEQ ID NO: 2844 - DNA, 75 bp, Homo sapiens
tgctgtcccgggtccagtctggccgatacttggccccaagctctagggccttatctcgcagctcggagcggaagg

SEQ ID NO: 2845 - DNA, 75 bp, Homo sapiens
agctccttgcggtcccggtaccagcgcagggtggcagccggacgggaccgcggaacgaggcagctgagctccacc

SEQ ID NO: 2846 - DNA, 146 bp, Homo sapiens
tagtaccgtgagcgtggcaatctggtggtgggtgtcttctgtgtagagctggcagaaatagcccccctcgtcctccaggcgggcatctgagagccggatccgcacccggcgtggggagaactcctcaagctggaaacgctcatcct

SEQ ID NO: 2847 - DNA, 528 bp, Homo sapiens
gtgccagaaaattggaggcccgacagaagcccttcccacactcctcacattgatagggtttctctccagtgtggcacctctgatgggcttgaagctgtgaacctacactgaagcccttcccacactctgcacactgatatggtttctctccagtgtgaactctctgatgcacctgaaggctggagaactgactgaaggccttaccacacctctcgcatttatagggtttctctcctgtgtggattctacagtgtacattaagatctgagctccgactgaagcccttcccacatgtaccacatttgtagggtttctctccagtgtggcctctttgatgggccagaagatttgaggcctggctgaagcccttgccacactcctcacatttatagggtttttcccctgtatggactctaaaatgaatgttaaaatctgagctacgactgaagcccttaccacatgcatcacactgatacggtttctctccagtatggcctctttgatggtccagcagatttgaggcccggc

SEQ ID NO: 2848 - DNA, 196 bp, Homo sapiens
ttaaccaggcctcaagactctaccataaagagctctcagttctttgaacagggtgatgcccactcccaggttgaggaaggactatctataatgcacacaggacagaaaccttccaattgtgggaagtgtaaacaatccttcagtgatatgtccatctttgatcttcctcagcaaatacgctcagcagagaagtctc

SEQ ID NO: 2849 - DNA, 69 bp, Homo sapiens
gggccagggatctctgtccatcttgtgctcggctgtatccccagtgccttcagtgacgcccagcacatg

SEQ ID NO: 2850 - DNA, 82 bp, Homo sapiens
gcgcagcctgcagcgggagaccctgtccccgccccagccgtcctcctggggtggaccctagtttaataaagattcaccaagt

SEQ ID NO: 2851 - DNA, 44 bp, Homo sapiens
gcgctgttggcccggtgggcagcgtggggggtatcgcgggtagg

SEQ ID NO: 2852 - DNA, 84 bp, Homo sapiens
acgacgggccggaggtggacatctggagcctgggagtcatcctgtacaccctcgtcagcggctccctgcccttcgacgggcaca

SEQ ID NO: 2853 - DNA, 174 bp, Homo sapiens
agagaccaatgtttcccacccagaccccaagactgctgggagagatggtgtcagcagtgactcccaggaatatccagtggtgtggtggcccatcccaggcccggctgggcaggtggctggcttgctgggggatgtgatgatggtggtaggcatgggaggcactttggacgggat

SEQ ID NO: 2854 - DNA, 36 bp, Homo sapiens
aggaggcgcgggagagtctgaccacagcgactccag

SEQ ID NO: 2855 - DNA, 422 bp, Homo sapiens
gggcgaactgacgatgacttaggtagtaaagggacaggccggtccctagcaaaggcaactgaagaggacagcgagggaggaccggataaaaggacagtagcagtaggtccaggactggggactggtgaccaagtgactgagcctgaaagccagaatggactagccctggtcaagaccggtttttcctcccaaaaggccacgtcctgctggaacagaccacagaatgccgggctgggaggcgtttccctggaagacccagcatagccatgccagtggggtgcgccataggtggaagaagaggggggttatgttggatcgatccactcagggaggggaggatgtcaatgacaggtactaagatggattaaggtcaggagccgcagggtggtgactcattggagctaacgcagtccaggattcac

SEQ ID NO: 2856 - DNA, 25 bp, Homo sapiens
cagaccacccgccactgtagcacac

SEQ ID NO: 2857 - DNA, 136 bp, Homo sapiens
attgatcggaagcctccccgaagcccggctgcggagggtggtgggacaactggatccacagcgtctctggagcacttatctgcgccccctgctggttgtgcgaaccccgggcagcccgggaaatctccaagtcaga

SEQ ID NO: 2858 - DNA, 94 bp, Homo sapiens
aggacctgggagacgagcatgctggtggggaaggtggcggtgaggatgatcttgccctgctgcagggccacacccgtcacgatggggctgccag

SEQ ID NO: 2859 - DNA, 125 bp, Homo sapiens
cccggctataaagcgtggccgcctcccgcggcgctcgggacagccgtaccccgggcggtcggacgggcgggcgccggtgggagctcgggccgtgcccgctgagagatccagagcgctccgttccc

SEQ ID NO: 2860 - DNA, 95 bp, Homo sapiens
cgacacacggcctcgctgaagtcccacaccatggcccacggcatcttgggcaggtcgcacaggtagcaccactggcggcgggacgcctgcacaga

SEQ ID NO: 2861 - DNA, 31 bp, Homo sapiens
ccaccacgcccgacagtaaatatgttttgaa

SEQ ID NO: 2862 - DNA, 329 bp, Homo sapiens
ctggaggtctcgaagtcgctgaactcgctgtcgctggcgttgctgctgtcgtacgtgcccacgaccagccggggcggaggagtcaccatctgctgcactctcctcctcactcggggctccttgggctttttggggggctggggcgggtgcggggtgctcttctccatgatgcgggccacgtcctccagggtgcggccctcttcttccaggaactgggtcagccgctcccgaaattctgcttccttggtggcgggcttagagatgactctccagacgcccccagccagcctgacctcccgggggatgagcaaatagtcgacgtcctcccc

SEQ ID NO: 2863 - DNA, 25 bp, Homo sapiens
cagtagcggtggcggcgactgcagc

SEQ ID NO: 2864 - DNA, 86 bp, Homo sapiens
cctccatgtcatacaagacggtgtcgccagagcggaaggaggccacgatgtgggcaggctcggtgctggtgaaggccactgaggtg

SEQ ID NO: 2865 - DNA, 445 bp, Homo sapiens
cattccggtatctacagcagcgcatatacagtatcttacaggctgggccatccctccccactcccagactcctccctcttccgagatttccccccctccctgactccccgtcttccccccagcgcttggccctggggactaaggctggggcggcttcagccaaaatctcccaccccccaaatgaatgccagtggtcacacgtgctctctctaaacctatgcaatgggattgatggggcggggggcggtcacgggcagagcacaggattcacagtctgggcccctcctggccaccccctgatgaaggtgaggcaggcatgcccaccacccgccggctggctcagggaagatggctgggcgccgggctggagcaaccggcaaacgagccccactctctggctccaggaggctagtggtcacgtttggctcatttgctcttcacgggc

SEQ ID NO: 2866 - DNA, 42 bp, Homo sapiens
tgcggtcgcagaggccgacggagccggagtcgcggacgccgc

SEQ ID NO: 2867 - DNA, 27 bp, Homo sapiens
ctgcccatgaaccatcccaccgctatg

SEQ ID NO: 2868 - DNA, 37 bp, Homo sapiens
tgccgtgctgctcgccgtgtactacggtctcatctgg

SEQ ID NO: 2869 - DNA, 31 bp, Homo sapiens
catggttgctcactcccgtaataaaaaaata

SEQ ID NO: 2870 - DNA, 28 bp, Homo sapiens
gccccatcagaggggacgtgctgggtgt

SEQ ID NO: 2871 - DNA, 312 bp, Homo sapiens
agagagagaaaccggcctcatgactcagctggtcaggagatagggggccagatgctgaccccaaatccccggcagcacccctagcaaataggtctgtatcaaagattctgtacagctggttttgggggtgaagggcacctatgggggcttaaataaatggacagggggcaagggatgtagcgagaacagagggtgactgtccggccagcagcctgggcctctggcgcccctgcatgctgacccccggtgccacctgcccactgtggcccgcggcactccccagatgggaaaggagggaagctctccagcaag

SEQ ID NO: 2872 - DNA, 26 bp, Homo sapiens
cccagccgcctgagggaccgctgccc

SEQ ID NO: 2873 - DNA, 29 bp, Homo sapiens
ttcctgaatggtccgtttcgggagctgct

SEQ ID NO: 2874 - DNA, 24 bp, Homo sapiens
tgggcatgtaggaaggcctgcact

SEQ ID NO: 2875 - DNA, 78 bp, Homo sapiens
cttggtggagaatgaactgctgcagaacacacccgaggagatcgcccgcttcctgtacaagggcgaggggctgaacaa

SEQ ID NO: 2876 - DNA, 85 bp, Homo sapiens
ttctatggagctttcgcctacccggagaggcccagaaaattgaccggatgatggaggccttcgcccagcgatactgcctgtgcaa

SEQ ID NO: 2877 - DNA, 81 bp, Homo sapiens
gaagaaccacttcacggtggcccagagcgaagccttcgatcgtgcctaccgcaagcagatgcgggggatgccgaccttccc

SEQ ID NO: 2878 - DNA, 94 bp, Homo sapiens
tggggccgccacctacgaagagaaccgtgccgaggcccagcgctgggccactgccctcacctgtctgctccgaggactgccactgcccggggat

SEQ ID NO: 2879 - DNA, 328 bp, Homo sapiens
ctccgatgggtaggaattgtcacatacccatgtgacccgataggaggcaaaagaaatgagacttctgggattagtttagcctcagattctgcagctgagaagttgatcagccacctctgaaggacatgcagcttgcagaaaattagggtggtgttaccaaggtgaaaaggggaaatggctttagagtagacaacagagatgccctgaggggttgtgtaggttgttcactgcaggaagtcccctggttaagaaggcaagtggggtttaaacagacccacagtctactcatcaaaccaggtgtccttggcattgtgtccacccagagagc

SEQ ID NO: 2880 - DNA, 35 bp, Homo sapiens
tagccagggcttgggagaggctgagaacccgctcc

SEQ ID NO: 2881 - DNA, 76 bp, Homo sapiens
gaagccagcctcggatgtgcacgggaaggttgggatccctcctgagcgcattgcctctcttcccaaaggcgtggat

SEQ ID NO: 2882 - DNA, 78 bp, Homo sapiens
atccggggcaccagctaccagagccctcacggcatccccatagacctgctggaccggctgcttatcgtctccaccacc

SEQ ID NO: 2883 - DNA, 25 bp, Homo sapiens
tgccccaagcaccatatggaaataa

SEQ ID NO: 2884 - DNA, 87 bp, Homo sapiens
gggcactgtctggatcaacgcccacggcctcagagacccttcggtgcccacaggcggctgcaaggagagtgggtgttcctggcacgg

SEQ ID NO: 2885 - DNA, 39 bp, Homo sapiens
gcggctgagcaaagcggaaatcctgggtaattggaacat

SEQ ID NO: 2886 - DNA, 74 bp, Homo sapiens
agaagatgagtctcgagggaagacagaggagtcgggggaggatcggggcgatggtccgccagacagagacccca

SEQ ID NO: 2887 - DNA, 96 bp, Homo sapiens
ggcttgtcgggaaggcaaggtctcggtggaggtggtgaccgctggtggagccgccctcccgccgcccctgctgccgcccggcgactcggagatcga

SEQ ID NO: 2888 - DNA, 32 bp, Homo sapiens
acttcctgtatgtcacacccacgcctctgcag

SEQ ID NO: 2889 - DNA, 36 bp, Homo sapiens
tcctacaaagcatcgtgtgagatccgcgtgcttatg

SEQ ID NO: 2890 - DNA, 65 bp, Homo sapiens
gtgttgtcgatggcgacccgtttcccttgcttcagggctgtctcacacgtggtcacacagcgctg

SEQ ID NO: 2891 - DNA, 96 bp, Homo sapiens
tcatctgatgaccgcgcctctgtcctcttctccttgaagccccagacgggcacagacacaggcagggacttggcgtactgctgtgtgggtagggct

SEQ ID NO: 2892 - DNA, 105 bp, Homo sapiens
gggcctacctggttctggtgacccaggctggaggttccctgcccgcactgcacttccaccgcgggggcacccgcgccctgctccgcgtcctcagccgctacctgc

SEQ ID NO: 2893 - DNA, 94 bp, Homo sapiens
gaaggcagctgtacttcgggcagtggaggaacgtgagcgggccgaggcagagggccgggagcgtgaggctcgggccctgtcactgacacgggca

SEQ ID NO: 2894 - DNA, 76 bp, Homo sapiens
ctccgcgccttcggggtcaccgatgaggggttctctgtctgctgccacatccacggcttcgctccctacttctaca

SEQ ID NO: 2895 - DNA, 57 bp, Homo sapiens
atcaggacccccaccggggacgagtttgtgaagacctcagtgcggaaggggctgctg

SEQ ID NO: 2896 - DNA, 120 bp, Homo sapiens
tgccagtgctccacgggcttgcggggattggccagcatctctgcccagtgctcgcggccgtgcgggtcggcagcgtcggggcccacacggcacacgccgatcacctcgttgtgcccgatg

SEQ ID NO: 2897 - DNA, 84 bp, Homo sapiens
ggcgggggaatgtcctccgaaccaggcacagacaggctgcggctgaatttcatggctgggggtgctaggtaaggtctgtcatct

SEQ ID NO: 2898 - DNA, 69 bp, Homo sapiens
gatttttgccggagcatcaacccaggtcctggaggcaggaaagaaggacgctcgtaacttggctgggca

SEQ ID NO: 2899 - DNA, 25 bp, Homo sapiens
tgtaaactcgggtcttgtatcggaa

SEQ ID NO: 2900 - DNA, 87 bp, Homo sapiens
gtgctgaaatggtacagagccgcctgccagggctgggaatgctgctcacactcccagcctcccacaatccgggactgaatcgggggc

SEQ ID NO: 2901 - DNA, 180 bp, Homo sapiens
cagcggttgcacagtcattgggcaggggcaggggttgaacgctgctggttacgcggacgggcaggcgcagccgcagcagccggaggtcgtgctcgtggctcgtcgaggctcccaggtagccgggatgggtcacagagaagccgctgtgccggatctgctcggtccagtcgagctggctga

SEQ ID NO: 2902 - DNA, 39 bp, Homo sapiens
gggcaggaatgacacccaccctaccacagggtcagcctc

SEQ ID NO: 2903 - DNA, 227 bp, Homo sapiens
atcgaccgtgggtatcctcttgcacttttccacttggggtgtttgtggccactggaatatcccatggtatatcggccccttccttgaaccaggatccataaacagggctagaggcagtccagttgtaatgggggtaaaggacactgcagggcacagagacacacagaccctcctgcacagtcaccgactctggcacctccagcctgtatcttgacagtaggtcctgg

SEQ ID NO: 2904 - DNA, 24 bp, Homo sapiens
gagtagtacagagcgacatgatca

SEQ ID NO: 2905 - DNA, 221 bp, Homo sapiens
acactactgctaacatggccaagcacatggatgctccagcattttctcagcttcctgctttgttttcttgatctgtccccatgttatgggggtggatgtcagtgtgactccagtcggcccttgctccatctttgcattcaaattcagctggctcacgactcctactggagggaccaggtccacggttggccaacgtgggtcctgctagtctcccatttcat

SEQ ID NO: 2906 - DNA, 29 bp, Homo sapiens
tgaacgtgcaccggcgctgtgtgcgtagc

SEQ ID NO: 2907 - DNA, 28 bp, Homo sapiens
gcgcgccgtgccaggaagactttattct

SEQ ID NO: 2908 - DNA, 28 bp, Homo sapiens
taaggtggtctacacctccctgcaatgg

SEQ ID NO: 2909 - DNA, 75 bp, Homo sapiens
caaggtccaggagagcttgtggtctccttcctcagtcagaatgaacctgtcgaatctcagccgtgagccacactg

SEQ ID NO: 2910 - DNA, 24 bp, Homo sapiens
aatccaagcgctttgtgcagtggc

SEQ ID NO: 2911 - DNA, 152 bp, Homo sapiens
tagaggccgatgacgtcgttcagctcgaggtccgcgttggggcggcagcgggcctgggggggctgcgtcccggggcggggttccgcgtcgggcttggcggcagccgcctccgggcgcgccgcgtccatgacgcccagcaccgcgtccagcat

SEQ ID NO: 2912 - DNA, 25 bp, Homo sapiens
ctcacccacaaggtccgtctcaaca

SEQ ID NO: 2913 - DNA, 125 bp, Homo sapiens
ggttcatcctggacccgaagtgatctcgggagagaaggtgaccttctactgccgtctagacactgcaacaagcatgttcttactgctcaaggagggaagatccagccacgtacagcgcggatacg

SEQ ID NO: 2914 - DNA, 37 bp, Homo sapiens
ataacccgcggctgtgaacatcctgtcggcctccatc

SEQ ID NO: 2915 - DNA, 84 bp, Homo sapiens
aggtggagccatggatgcccgtgtgtctgcccagctctgtcctggccacgccggggtgcagggcgttgacagtcacaccagagc

SEQ ID NO: 2916 - DNA, 86 bp, Homo sapiens
gtcaggccctcaagggctgggttgctggcttcaagaggctgggccaggatgtcaaggggcggagttccgggttccacagctgggac

SEQ ID NO: 2917 - DNA, 116 bp, Homo sapiens
tcaacggccgactctctctcatcttccttacaaagctgaagggcccaaggagaccctcggactgcagctgccggagcaggacgtccagggcaatgagggttcctgtgcgacccacg

SEQ ID NO: 2918 - DNA, 81 bp, Homo sapiens
cccagccgtcggttcaagcgagtggtggagaccatccaggcacagctcctgagcactcatgaccagccctccgtgcaggcc

SEQ ID NO: 2919 - DNA, 42 bp, Homo sapiens
cagcatcatgtactcaacccgcaagcggagtgctcagctgtg

SEQ ID NO: 2920 - DNA, 34 bp, Homo sapiens
aagcgcgggtcgaagggcggcgtcgaccatttcc

SEQ ID NO: 2921 - DNA, 33 bp, Homo sapiens
ggtcccagagtgggtggtcatctctggtgatga

SEQ ID NO: 2922 - DNA, 44 bp, Homo sapiens
aaacctttgaccagaggcgctaaagaggagcacggtggactgat

SEQ ID NO: 2923 - DNA, 24 bp, Homo sapiens
atggagaatgaggcgatagcttct

SEQ ID NO: 2924 - DNA, 950 bp, Homo sapiens
ctggagctgtagggaaagaacttcccacattcactgcactcataaggcctctccccagtgtgaactccccgatgttgaaggagtgcagacctttggctaaaggatttcccacattcgctgcacttataaggcctttctccagtgtgaaccctatggtgttcaatgaggctagagttttggctaaatgacttcccacattcgctgcactcataaggcctggatccactgtgaactttctggtgttttatgagactggaatgatatgtaaaaaacttcccacattcactgcactcataaggcctctccccagtgtgaactccccgatgttgaaggagtgcagacctttggctaaaggatttcccacattcactgcactcatatggcctttccccagtgtgaactctccgatgtttaatgaggttagacttgttgctaaataattttccacattcatcacattcatgaggtcgtactgcagtgtgaactctccggtgctgaatgagactagagctttgcctaaaggacttcccacactctcgacattcataaggcttttctccagtgtgaagtctccaatggtcattgagactgtagcttttgctaaaggatttcccacattcactgcatatgtaacatctttctgtagtgagggttctctgctgctgaacaagtgtgtgtttaccgctgaatgcttttgtgtgttctccacagttgtaatgagtttttcctctgtgactgatggccccaccgtcgcttttgctatttgattgctccccagtgtgagcagcctgttgatggagaaatcccaacttggccaggaagtccttcccaacttctctgcaggtggaaggctcccctgacacatggaatgtgcaggtcttcacaaacaaggctctgcccacattgcttctgaaatgtttttctccaaggtgctgcttctgatgatgaac

SEQ ID NO: 2925 - DNA, 33 bp, Homo sapiens
ttcccgcgggacaagcccggctcgtcagcccca

SEQ ID NO: 2926 - DNA, 37 bp, Homo sapiens
accccggaagagtggggactgctggacctcaaacaga

SEQ ID NO: 2927 - DNA, 27 bp, Homo sapiens
acagaggaccgagtaccgcgatgtgat

SEQ ID NO: 2928 - DNA, 85 bp, Homo sapiens
tcacgcaaggaagagggcctgcctgaagaggagccatcccatgtcacgggaagggaaggattcccgacagatgctccttatccca

SEQ ID NO: 2929 - DNA, 59 bp, Homo sapiens
acttgcagcacagtcccctgaggggaaccatggacaccaagaaccagcctccacatcct

SEQ ID NO: 2930 - DNA, 101 bp, Homo sapiens
ggcttcgactggaagtcagtgttcgtcatccaccaccggacacacacgagtgggccaggtgtgcagtccccggggctagccaccggggaaagcacagagaa

SEQ ID NO: 2931 - DNA, 260 bp, Homo sapiens
aatcagaaattcccacctggcccagcagcaccaaccagaaagaagggaagaagagaggaaaaaaccacaggaagaaagaaaggagggagggagggagaggaggaaggaaggaggagggaagggaaggggggaagaagggagggagggagggagggaaagaaagagggaggaagggcagagggagcagggagactgtagatcagggtctgaatggagatccggtcctggaagtaaatgatccaaggctccaggtgctggga

SEQ ID NO: 2932 - DNA, 59 bp, Homo sapiens
acatggcctaagatgtgggtcctggatccttccccccttctcaccataaccccctctca

SEQ ID NO: 2933 - DNA, 93 bp, Homo sapiens
accacgacaatcttatcgcctgatgccttcttcaccacctgatgggctttgtgcgagctccacccagcacagtcacgcccgtcaatctgcagg

SEQ ID NO: 2934 - DNA, 38 bp, Homo sapiens
cttggtccacttttaggtcctctagagatgggtacagg

SEQ ID NO: 2935 - DNA, 172 bp, Homo sapiens
cagcaacaacgaccgaggtgtggtgcaaggacagtggcagggcaagtacggcggcggcaccagcccgctgcactggcgcggcagcgtggccattctgcagaagtggctcaagggcaggtacaagccagtcaagtacggccagtgctgggtcttcgccggagtcctgtgcaca

SEQ ID NO: 2936 - DNA, 26 bp, Homo sapiens
tagggccttggtgggcgcattcccgg

SEQ ID NO: 2937 - DNA, 24 bp, Homo sapiens
ccttcatggaactcagcacctgct

SEQ ID NO: 2938 - DNA, 108 bp, Homo sapiens
agcctcgcttgctgtctgctcggcctcctggcgctgacctccgcctgctacatccagaactgccccctgggaggcaagagggccgcgccggacctcgacgtgcgcaag

SEQ ID NO: 2939 - DNA, 45 bp, Homo sapiens
cggccaacgagctgcgggcccgggatcgcggcggctggacggggc

SEQ ID NO: 2940 - DNA, 83 bp, Homo sapiens
aaatatcggtctcccgtaggttgctgtagtcggccaattcgtaggcctggcaggtggcgccctcggccacctcgtgtgggacg

SEQ ID NO: 2941 - DNA, 44 bp, Homo sapiens
tgaatgaagcttttaagtaccggcatctcgaactttatatactg

SEQ ID NO: 2942 - DNA, 90 bp, Homo sapiens
gaatgcgttcgttgtcatcctgcatctgcaggcgaatgggccggcgcaggccccaggagatgttcaggagcccctccacaatgaactcgt

SEQ ID NO: 2943 - DNA, 25 bp, Homo sapiens
gaggttccgcaactgtgtcatttgg

SEQ ID NO: 2944 - DNA, 49 bp, Homo sapiens
tgggagctgggatacacagggaaaggtgttaccattggaattatggatg

SEQ ID NO: 2945 - DNA, 88 bp, Homo sapiens
ctgaggcattcttgggccacatagcagttgactgccctctccaccatcttttcacaagtgttaatcccaataaacacccatcctcttc

SEQ ID NO: 2946 - DNA, 29 bp, Homo sapiens
ccagtaaagtggcggtgctctctcttcct

SEQ ID NO: 2947 - DNA, 24 bp, Homo sapiens
catcatgatccagcccattctcta

SEQ ID NO: 2948 - DNA, 32 bp, Homo sapiens
tgttcggcgtccacctgaacaagtggcagctg

SEQ ID NO: 2949 - DNA, 39 bp, Homo sapiens
agcagagggcggtgcaaagaccttgagcggcggccggcc

SEQ ID NO: 2950 - DNA, 86 bp, Homo sapiens
cctccttgcggcagcgcgtggagtgcggcgtcctggagctgcggatgaggtgggtaacgccgtgctgactagcagcgacgcaagga

SEQ ID NO: 2951 - DNA, 197 bp, Homo sapiens
actgaaggccctcggtgctggccagccagcgcgtgtacgggttgtcgctgctgtcgtagaaggggttcttcaggggcaggctctgcaccgcgtccagggcgccctgccccagcggcccggccctcttggctggctcgggcccctcgttctcttcctccggaccttcggccacagagccctcctcatcgttggtgtcc

SEQ ID NO: 2952 - DNA, 117 bp, Homo sapiens
tgccggtggctctccctgatcctcctcaccattcccctggccctggtggccaggaaagacccaaaaaagaatgagacaggggtgctgaggaaattaaaacccgtcaatgcctcaaat

SEQ ID NO: 2953 - DNA, 126 bp, Homo sapiens
cctgcgcaggatgtctgtgatcgaggagggggactgcaagcggatcaacatggcccacctgtgtgtgattgggtcccatgctgtcaatggtgtggcgaggatccactcggagatcgtgaaacagtc

SEQ ID NO: 2954 - DNA, 43 bp, Homo sapiens
ggcaccaccgggtcgtcctcagcgtgcaggatgagcaggggac

SEQ ID NO: 2955 - DNA, 24 bp, Homo sapiens
tatatgaggtcactgggaggagat

SEQ ID NO: 2956 - DNA, 110 bp, Homo sapiens
ggtaatgagaccaagccttgctcggtttaacccgagtggaagactctagaagtagcgcgggctcatgactgaagaggccaagctggaattcctcaagactcactttgccg

SEQ ID NO: 2957 - DNA, 29 bp, Homo sapiens
tggagtcggatcccgaacgcaccctcgcc

SEQ ID NO: 2958 - DNA, 26 bp, Homo sapiens
agctagctggccctcgccgccggcgc

SEQ ID NO: 2959 - DNA, 25 bp, Homo sapiens
ggaaatggtggtggagccgccgctg

SEQ ID NO: 2960 - DNA, 30 bp, Homo sapiens
ggcgccctcctccttgttcgcgtcctcggc

SEQ ID NO: 2961 - DNA, 31 bp, Homo sapiens
cttcttcaccagtgacacggggcttgaatat

SEQ ID NO: 2962 - DNA, 24 bp, Homo sapiens
gaagcttcaggggaccacgtctgt

SEQ ID NO: 2963 - DNA, 24 bp, Homo sapiens
atgctccccaagatggtcaacaag

SEQ ID NO: 2964 - DNA, 31 bp, Homo sapiens
tgctgaatgtctccggcctctttgttctcct

SEQ ID NO: 2965 - DNA, 24 bp, Homo sapiens
cgggcgcgagctgggggtgccgcg

SEQ ID NO: 2966 - DNA, 37 bp, Homo sapiens
tgatgcggcgcccattcttcaaccgataccggtccac

SEQ ID NO: 2967 - DNA, 114 bp, Homo sapiens
caaacagtcagaatcactcagtgaactgatcactcttcgggaagccctggagtcaagtcacctggaaggggagttactgaggcaagagcaaacggaagtgaccgcagcgctggc

SEQ ID NO: 2968 - DNA, 87 bp, Homo sapiens
ggcgagaaatgctttgcaggtcgacctggcggaggcagagaagaggagggaagccctgtgggaaaagaacactcacctggaggctca

SEQ ID NO: 2969 - DNA, 59 bp, Homo sapiens
ggagggagttcatagcaaccactccctccatcaccacggagaccatatcgaccaccatg

SEQ ID NO: 2970 - DNA, 73 bp, Homo sapiens
ctgcttgtgccagggactattctcaggctgaagaaggtgggaggggagggcggaacctgaggagccacctgag

SEQ ID NO: 2971 - DNA, 88 bp, Homo sapiens
gcctagtggcgtataagaagaccccgccaccggtccctccacgcaccacttcaaagccgttcatctcagtcacagtccagagcagtac

SEQ ID NO: 2972 - DNA, 48 bp, Homo sapiens
ggcccagttccacgcacccagcgagcccaagcgccttctccgcaccag

SEQ ID NO: 2973 - DNA, 101 bp, Homo sapiens
gcggtgagatgtacagccagccattgtcaaggcagtggatcctgtagtgtctgatccggtcccaggatgcagggcggctgaggcggactgacagagagtaa

SEQ ID NO: 2974 - DNA, 82 bp, Homo sapiens
atgggagactttggccacgtggacgctggggatgttatactctctgcctgagacttcagacagcaccgtccaccagtctcca

SEQ ID NO: 2975 - DNA, 80 bp, Homo sapiens
ggtcgggcttagagtccaagtcaccagtgcggaaagcctctcggatcctgggctcccattccggcaggtccctgaagtca

SEQ ID NO: 2976 - DNA, 151 bp, Homo sapiens
tcctggcgagtccttcctgttcagctccctgtgcgaccctccagggatgcaggggatccaggattctctgccctgtcacacggcgagtcagaagggaggggcctttccctcggacccatggccccaggcagagttttgcaccagcaggacc

SEQ ID NO: 2977 - DNA, 93 bp, Homo sapiens
ggccaatgatgacattccggaagcccttcacagccttcagcttgtcgctctcgaagttcaccaccagcttgtggaggcccatgtggagcggca

SEQ ID NO: 2978 - DNA, 86 bp, Homo sapiens
agaacagtgtgtggaactcgcagctggatgcagtatgcccggacaccatgaacaaccctctttcccactactggatctcctcctcg

SEQ ID NO: 2979 - DNA, 39 bp, Homo sapiens
ccaagaaggactcgggtcaatggagacaaccgcctctag

SEQ ID NO: 2980 - DNA, 26 bp, Homo sapiens
gcagggaaggtgcctagagtccccac

SEQ ID NO: 2981 - DNA, 24 bp, Homo sapiens
cggggtcacctgggcgctgcccat

SEQ ID NO: 2982 - DNA, 184 bp, Homo sapiens
tcgtgtgaggagcactcggatctcatactcaacatcggggtccagatgccacagcttatagttgggagagtcgactatgtgggtctctgcccacgtgcctgtggtggtgcgatattccacttccttcaggatgatggggccatccccgatgatggagttggcatttggcttgatccacaggtat

SEQ ID NO: 2983 - DNA, 45 bp, Homo sapiens
tgcaggggttgcttacctcgggtaggaaaccctcaggcggtggca

SEQ ID NO: 2984 - DNA, 65 bp, Homo sapiens
gggggagccctgcgaccaactccacgtctgcgacgccagccagggcctggtctgccagcccgggg

SEQ ID NO: 2985 - DNA, 90 bp, Homo sapiens
aggccccatctggtcctaagtccctgctgcccttccccttcccacactgtccattcttcctcccattcaggatgcccacggctggagctg

SEQ ID NO: 2986 - DNA, 98 bp, Homo sapiens
ccgtgtagtttcagattcttggtccatggatgacaccacctgcccatgcttccttgaattaggctttcctaacctgaagcgccttcaaacttccaata

SEQ ID NO: 2987 - DNA, 88 bp, Homo sapiens
gtggggaggtacagctgggagtgtgggggatggggaaggatggggagggaacgggcccgtggacaacttgcatttgccctgacaccca

SEQ ID NO: 2988 - DNA, 121 bp, Homo sapiens
accctttggggctgaatgcgaccccactgccccaagactcaagcttggtggaaactcccccggctgagaacaagcccagaaagcggcagctctcggaagagcagccaagcggcaatggtgt

SEQ ID NO: 2989 - DNA, 25 bp, Homo sapiens
agctgcttgcgtgtcggcaccgtac

SEQ ID NO: 2990 - DNA, 79 bp, Homo sapiens
ggacagctccagagtcggggaagcgccatggttcctgcgcagaaaggatgcgggttggggccggcagatcctgccagga

SEQ ID NO: 2991 - DNA, 26 bp, Homo sapiens
tggagggatattcccgagaggcagag

SEQ ID NO: 2992 - DNA, 74 bp, Homo sapiens
tggtcaccaccactcaactaattcctgccctggccaaagtcctgctatatggcctggggtctgtgtttcctatt

SEQ ID NO: 2993 - DNA, 24 bp, Homo sapiens
accatttattgatgacaaacactt

SEQ ID NO: 2994 - DNA, 106 bp, Homo sapiens
gctcgggtgtcaggttgacagttatgtttttatacaaggcgtcgtatgtgatgtttgcaaagtagttcaggttgttgaggccatccagcccttgccgttcttttga

SEQ ID NO: 2995 - DNA, 68 bp, Homo sapiens
cgcagccagctcgcgggccccggcgtgctgcgcgccccagcggcaacaagacgcctcgtcctcgtcca

SEQ ID NO: 2996 - DNA, 121 bp, Homo sapiens
atggcgaatgtgccttgcagattacatatgagtatatctgtctttgggacgtccagaatcccagagtcaaactcatctcttggccgctaagcgccctgcggcggtatggacgtgatactac

SEQ ID NO: 2997 - DNA, 92 bp, Homo sapiens
aacaaagagcgtttgcagttgcacgtgcaggagacattgggctgcccggcggcggcggcggcggtgctgttgacccccatcaagcggtgcat

SEQ ID NO: 2998 - DNA, 142 bp, Homo sapiens
agaccagagcgaattcatcctgaagaactcagagaaagccggtgcaggaagtgggttcccgctctccctgcacaggcacagtgatgctgccagagctctcccagaaagaccaggaggcttgttctggagaagtcaagcccag

SEQ ID NO: 2999 - DNA, 148 bp, Homo sapiens
ctatccggtggaggaggaccatctgcctctcgctcagtgtgtggttcaggcggtgtgcaatggagatgggggtctcccccttggcatctctgtcgtggatggaggccccgtgctggagcaggaggattatacagtctgaccggcccat

SEQ ID NO: 3000 - DNA, 24 bp, Homo sapiens
tacaataaagcaatcacgcagatt

SEQ ID NO: 3001 - DNA, 68 bp, Homo sapiens
gcttagcgaatgccacagacggcgtgcggctagcagcccgcatcgtggacacaccctgcaatgagatg

SEQ ID NO: 3002 - DNA, 26 bp, Homo sapiens
tgccggggatgaagcgagactgcggg

SEQ ID NO: 3003 - DNA, 92 bp, Homo sapiens
cagaacattccagaacccgttgtggaaaaaccctttcaagaagctgttttaagaggctcgggcagcgtcttgaaaatgggcaccgctgggag

SEQ ID NO: 3004 - DNA, 73 bp, Homo sapiens
tggaacaggagttgcaacctgatttgctggactctttgggttcaaaagcgactccgtttgaggaaatatattc

SEQ ID NO: 3005 - DNA, 125 bp, Homo sapiens
gtacacagtcatcgttcaggccacagatatggaaggaaatctcaactatggcctctcaaacacagccacagccatcatcacggtgacagatgtgaatgacaacccgccagaatttaccgccagca

SEQ ID NO: 3006 - DNA, 39 bp, Homo sapiens
gcgcagccggagtatccacctcgatgaccacgggctgag

SEQ ID NO: 3007 - DNA, 95 bp, Homo sapiens
tgtggcgtccactgcccggttcaaagcctctcgcaggtccatgaggccggcctcgtgctgggccagccggtcgcgggtttgtgtggccagtgcct

SEQ ID NO: 3008 - DNA, 37 bp, Homo sapiens
ggccgcctagccgccgtgcgtcctgcccgaggcttgt

SEQ ID NO: 3009 - DNA, 124 bp, Homo sapiens
gccacacgcggccggcgttgatgaggacttccacggggaaggtggggtgggctggctggtagccgtgcagcaggaaggcatagcggcccagcgtgggcacatgggtggtgaagaccacggtggc

SEQ ID NO: 3010 - DNA, 111 bp, Homo sapiens
gaagtgaaagtagccgggggcacagcgatcacatgtggccccctcgaagcccactcggcacctgcactggcctgtgtcagggtcacagcggtcatcggccactccagggct

SEQ ID NO: 3011 - DNA, 52 bp, Homo sapiens
tgcagccacccccagacgaggcccgcagggacatggccggggacacccagtg

SEQ ID NO: 3012 - DNA, 72 bp, Homo sapiens
cgccgcctccacggagctgcacaacctggcctcccgcacagagtacctggtctccgtgttccccatctatga

SEQ ID NO: 3013 - DNA, 88 bp, Homo sapiens
gctgactttgaggcccggggtcaggtcctcggtcacaaactcgcaggggcagctcttgtcatccacaatgtcctctccggggaggctt

SEQ ID NO: 3014 - DNA, 25 bp, Homo sapiens
tagagcgtccggggcagcatccaca

SEQ ID NO: 3015 - DNA, 151 bp, Homo sapiens
cgtgcagcagcttccgtagcgcagccgggggcaggttctcgtacagccgggcctgctgcagggactcgggcctggcgacagtgtccagcagcccgtcctccccgacggtcaccatcaccttctggctctcgtccagaagctcccgtaggat

SEQ ID NO: 3016 - DNA, 91 bp, Homo sapiens
ccgttcatgcggatggctctcttccagtccttcagggtggacttcccggccaggtgcacaaattcctttgggctgattacatgctcgtcgt

SEQ ID NO: 3017 - DNA, 85 bp, Homo sapiens
gcgagaacacctccgagacggcatctctgcccgcaagattgccgagagggcgcaaggagagcttttcccggatcgggccttgtca

SEQ ID NO: 3018 - DNA, 39 bp, Homo sapiens
ccatcgggcgagtgatccggcaccgccaggactacggag

SEQ ID NO: 3019 - DNA, 34 bp, Homo sapiens
agaagatgctgtcagcgaggccaagtcgcctggc

SEQ ID NO: 3020 - DNA, 161 bp, Homo sapiens
tcatgggagagacatcgctgggcagcaggccacgggagctccgggcgggcccctctcagcaggctgtgtgtgccagggctgtggggcagaggacgtggtgcccttccagtgccctgcctgtgacttccagcgctgccaagcctgctggcaacggcaccttc

SEQ ID NO: 3021 - DNA, 117 bp, Homo sapiens
accatgccagcaagagtgccaagcgggccctgagcctgcggctcttccagactgaggagaagatcgagcgaacccagcgggacatcaggagcatccaggaggctctcgcccgcaacg

SEQ ID NO: 3022 - DNA, 33 bp, Homo sapiens
gacctggccagtgaccagtcctctccgtccacc

SEQ ID NO: 3023 - DNA, 39 bp, Homo sapiens
tttgtcttctgcggcctcctcacgtgctgctactgctgc

SEQ ID NO: 3024 - DNA, 37 bp, Homo sapiens
tgtggggccaacagttgagcgggagcacgcgcccggg

SEQ ID NO: 3025 - DNA, 106 bp, Homo sapiens
ggttggagccttctggcccaaggatgaagccagagacaggaagtgttctgcaaccccagtccccaaagtgctcctggaacttgtctccctactactgcaggccaag

SEQ ID NO: 3026 - DNA, 25 bp, Homo sapiens
aggctggggcgcgtcgcacactctc

SEQ ID NO: 3027 - DNA, 43 bp, Homo sapiens
tccagcaagcagaaaggcatcctgagtcacgaagaggaggacg

SEQ ID NO: 3028 - DNA, 25 bp, Homo sapiens
ctgtaaaaaatgcctcttctgagta

SEQ ID NO: 3029 - DNA, 52 bp, Homo sapiens
aaaagccccactcgttcttgtctccctcctggtccagttggggtagaaatgt

SEQ ID NO: 3030 - DNA, 94 bp, Homo sapiens
cattgcttaaacgcagaaggcctttgggagagaggacatccttttgctaacttccggtttccatcctggcactgcaccgttctggtgtgccaac

SEQ ID NO: 3031 - DNA, 132 bp, Homo sapiens
ggggctggcaacagcttcgtaatcctggcttcctgctttctgggtcaaagccctggtggtgtgttcttgatatcggtccatctagtggcgttgtttgattcctcccaccttgctgatcattcgtagtgtagc

SEQ ID NO: 3032 - DNA, 26 bp, Homo sapiens
ctttccagaattagaccagcagctac

SEQ ID NO: 3033 - DNA, 31 bp, Homo sapiens
ctccatagtatgatgggcggtagcagccata

SEQ ID NO: 3034 - DNA, 39 bp, Homo sapiens
atagccacagaacccatagccaggggtgccatagtagtt

SEQ ID NO: 3035 - DNA, 43 bp, Homo sapiens
aggaggaccctgcgaaagctgcgacgactatcttcccctgggg

SEQ ID NO: 3036 - DNA, 26 bp, Homo sapiens
tggtaccacctcccgaaaatgtcaga

SEQ ID NO: 3037 - DNA, 124 bp, Homo sapiens
gtgggctatgattcagcaggtccaggtacggagcgagtgcacaggtgtccggctctgcagaaaggcattcccgctgcctgggcctcaggtacacggctctggtgttgacggtgcaccaagccca

SEQ ID NO: 3038 - DNA, 348 bp, Homo sapiens
aggaaaggttccacagtgagacactcacagaaggagacctggtggatctcatgaaaaagtttgtggaggacacaaaaaatgaggtgcatgagagggaaggctggcccaactcaccttatggggtgtccaagttgggggtcacggtcttatcgaggatcctggccaggcgtctggatgagaagaggaaagctgacaggattctggtgaatgcgtgctgcccaggaccagtgaagacagacatggatgggaaagacagcatcaggactgtggaggagggggctgagacccctgtctacttggccctcttgcctccagatgccactgagccacaaggccagttggtccatg

SEQ ID NO: 3039 - DNA, 48 bp, Homo sapiens
cagttggattatatgggaatggcttcaagtcgggttctatgcgtctgg

SEQ ID NO: 3040 - DNA, 108 bp, Homo sapiens
ctcatggaagctgttgtagtcaacttcgtagaacccgtcctccagggtcaggacaggtgtgaaccggtaaccccacaggatctcactggtgatgtaggagcttcgagc

SEQ ID NO: 3041 - DNA, 30 bp, Homo sapiens
tgatatgagctgctgggtccgggacagtct

SEQ ID NO: 3042 - DNA, 24 bp, Homo sapiens
ttcccagggatccacaatcttcta

SEQ ID NO: 3043 - DNA, 123 bp, Homo sapiens
ttggaaccgagctggtgtcagtggtggtggtggccagcttccccagaaccagctccatgatccgctcatctggcgttgcactcacaggctcatccggagggacctcggtaatgatctctgcca

SEQ ID NO: 3044 - DNA, 81 bp, Homo sapiens
cgggaagttcaatagtggtgagttggtggccattatgggtccttccggggccgggaagtccacgctgatgaacatcctggc

SEQ ID NO: 3045 - DNA, 91 bp, Homo sapiens
ctcgctgatgaaagggctcgctcaagggggtcgctccatcatttgcaccatccaccagcccagcgccaaactcttcgagctgttcgaccag

SEQ ID NO: 3046 - DNA, 24 bp, Homo sapiens
caggcccacgtactcctcagcaga

SEQ ID NO: 3047 - DNA, 135 bp, Homo sapiens
acagacttcgggaagaagcaccagggcacttcaaagatgaagttggagaagcagcacttccgagaggcgcattcctcggggctgatgcccgggtagccacagtttcttcggtctgagacctccatgacgcactga

SEQ ID NO: 3048 - DNA, 27 bp, Homo sapiens
agaaaataaaatgccgcgcagcccttg

SEQ ID NO: 3049 - DNA, 83 bp, Homo sapiens
cacccagttctcctgtgtggcggtggatgcgagcggtgagatcgtctctgcaggggcgcaggactcctttgagattttcgtgt

SEQ ID NO: 3050 - DNA, 80 bp, Homo sapiens
gggctgaagtccagatctttgctcctgacgtccctcagatgcacgtgattgaccacaccaaggggcagccgtccgaaggc

SEQ ID NO: 3051 - DNA, 180 bp, Homo sapiens
aagccccgcatgttcaagaagacggtgtcattctgcagagcctggtccagcaggctgttgtccgtcttattgatccagtacacgttgggcctggggtagccgtttatggatgtacacgtgaaggtgagctcatcctgggaggggctgtggggggcgctgacgacgggcacgctgaagttt

SEQ ID NO: 3052 - DNA, 80 bp, Homo sapiens
gatgagcagcgtctctccggagcagcagatggagcagtaggattggtacccgtcatcgtcgtacaggaagagggcatcca

SEQ ID NO: 3053 - DNA, 56 bp, Homo sapiens
ctggggaacccctagccggcatggacacgactcttgtctacaagcacctgccggct

SEQ ID NO: 3054 - DNA, 33 bp, Homo sapiens
ggcagcggcctacaacctggtccagcacggcat

SEQ ID NO: 3055 - DNA, 68 bp, Homo sapiens
ctgctggaagccacgcctgacacgccggcctgcgtggtcaccctctcggggaaccagtcagtgcggct

SEQ ID NO: 3056 - DNA, 176 bp, Homo sapiens
atcttttattagggaggacagcctgcaaaatcctccctttaagagcccaggccagcctagaacctccagaccacagaaggggagtcctggggacaggactggtgtagacaggcatctccaccgccccggttagccagtacctaacacccactcctgccctcggccgatgtggcaaa

SEQ ID NO: 3057 - DNA, 27 bp, Homo sapiens
cgcggccgccatggaccccatgggaga

SEQ ID NO: 3058 - DNA, 48 bp, Homo sapiens
aagccgcccccgacagaatatcggccgccgattgtccgggccagaact

SEQ ID NO: 3059 - DNA, 62 bp, Homo sapiens
aggccagcacgtccgcggtgaccgggaccagtcccctccgggctggcacaagtgtgggagca

SEQ ID NO: 3060 - DNA, 75 bp, Homo sapiens
ggtgatgaagctctcccctggccgtatctgcgccatgaagccgtagaagcaaaggtagcacacgaggtgccgcca

SEQ ID NO: 3061 - DNA, 386 bp, Homo sapiens
caccggcatgcagtggtaattattttagaaatattgttccttggtgtcagcgtagctgtctgtcttaggagctgggtcggcgttccgacagcacttcctgtccgcccttctcctctgccatccagaaccgtccagaactgttgcctgagacccctcctctctcacacagccctgccatgctgactcggtttcccctcagagccattgttgtctgggctcgagtttctgccccaggttgtgtgctggaatcggggggtggctctcctgccacccatggggagcgccaggagaggagggtcatggaggatgttggggctctgaccccaggagtggggtggagggcggagcctgctgggggccctgccttcacagagatgccgcgtgct

SEQ ID NO: 3062 - DNA, 30 bp, Homo sapiens
accccaggcacgcggggaccaagaggagac

SEQ ID NO: 3063 - DNA, 27 bp, Homo sapiens
ggtatcaaggcaacagtggagccccag

SEQ ID NO: 3064 - DNA, 154 bp, Homo sapiens
tggacaggcggcaggcccgcagagccacagctcacacacgggtgcccggggcccacccacagcctcgcatggatggtggcgccaaggcccaggtcaccggcgacgtggaggcctcccatgatgctgctttggagccggttgtccctgacccaca

SEQ ID NO: 3065 - DNA, 26 bp, Homo sapiens
ctctgcccggacgctagccggcctgg

SEQ ID NO: 3066 - DNA, 86 bp, Homo sapiens
atgcgcccgtgtttcatctatggatagagctgagccgaagaaagacattgccacagccaacagcaagaagcacagggctggccgct

SEQ ID NO: 3067 - DNA, 120 bp, Homo sapiens
ccggccgtgacgaaggcacgccggggtgacctcaccctccaacatggcggcggcggtagattagggccgcgggtcggagcactcaccgccgctgggggaccctgtcggaagcaactgccg

SEQ ID NO: 3068 - DNA, 24 bp, Homo sapiens
cagcgggacgaagcggggaatgca

SEQ ID NO: 3069 - DNA, 40 bp, Homo sapiens
agagcgcgcccttcgccgttataggcagcaacacggtggt

SEQ ID NO: 3070 - DNA, 119 bp, Homo sapiens
cggcaagcgtccagcgtggctggcccccggccaggatgctgctccggcagaagcccacactctccaagcacacggagtccacgacagcgctcctgccctccgcgaggtcccacaggcac

SEQ ID NO: 3071 - DNA, 89 bp, Homo sapiens
tgagaagaggagcgggcgcccctgagcctgggctccttcgcagaagtgcagcgcatgcaccggtgactgggtgcctcggaggacaaact

SEQ ID NO: 3072 - DNA, 53 bp, Homo sapiens
cagctgttgccaggccattggcaggggctgcccactgcccatgccaccactga

SEQ ID NO: 3073 - DNA, 25 bp, Homo sapiens
tcctggaggctgtggaacggagcca

SEQ ID NO: 3074 - DNA, 27 bp, Homo sapiens
cctctccgctcccgtgtgggcccgcag

SEQ ID NO: 3075 - DNA, 632 bp, Homo sapiens
tctgatgccttctcgggcgctttgcgctccctgagcctcaaggcctcgagccggcggggcggggatcatgtggccctgcagcccctgcgctctgagggggggccccccacgccccaccgtagcatttttgccccccatgcactgcccaaccgcaacggcagcctgtcctatgacagcctgctcaatcctggctcgcctggtggccacgcctgccctgcccacccagcagttggcgtggccggataccactcaccctacctgcatcctggggcaacgggcgacccgccacggcccctaccccgcagcttcagccccgtgctgggcccccgcccccgggagccctcgcctgtgcgctacgacaacctgtccaggaccatcatggcatccatccaggagcgcaaggacagggaggagcgtgagcgcctgctgcgctcccaggccgactcactcttcggcgactcaggcgtctatgacgctcccagctcctacagcctgcagcaggccagtgtgctgtccgagggcccccgaggtcccgcgctgcgctatggctccagagacgaccttgtggctgggcccggcttcggtggcgcccgcaaccctgccctgcagacgtcactgtcctcgctgtccag

SEQ ID NO: 3076 - DNA, 31 bp, Homo sapiens
tgggcagcccctcggtcagtccagcagcccc

SEQ ID NO: 3077 - DNA, 55 bp, Homo sapiens
tgggaatccccgagccaggcgacgtgcagggtcgctcctgcaatgagcgcacaca

SEQ ID NO: 3078 - DNA, 438 bp, Homo sapiens
taaatttagcccagtccaggaactggacagacaccacttgtttggcccttttcagttaaaactatgggtccagtacagttcaaattatagatattagggcttcttccccttgggaaacttgctttacagctgtggctgagaatatggccagttcattctccactaacggctagccagaagggagaggagagggaatgaatcaaattcacctttagatcacagaacaggaagtcagctagtaccaggcaccattctattaattttattgctatttcacctcaaaccaatgatacatgacggctgtttgatgtctgcaggggcccttcaccaaacaaaaccattttactttgaatggtttggcttccttggatgttttcaggtaggtaaagatactctgaagcagtgttccttttgacctggccccaagactagaatgaa

SEQ ID NO: 3079 - DNA, 208 bp, Homo sapiens
gcacttctgggaattcggcagcaagtgggccagggcataacaaagccattccagtctgactagagttaaccatgaaatgctgaatgcatggaaaaagctgtaaagaaaactaagtatttcaaaaattctatgaattctgtatatagaaaaaagagctttcaagcttaggagtaacatgaaataccaaaacaataaataggtgccaggg

SEQ ID NO: 3080 - DNA, 26 bp, Homo sapiens
atgttgggagttataaccttgtctcc

SEQ ID NO: 3081 - DNA, 180 bp, Homo sapiens
gatgtcggcaaagctcagaggaaaaagaagcagcccggcggtcccggagaattgaccgccacctgcgctcagagagccagcggcaacgccgcgaaatcaagctgctcctgctgggcaccagcaactcaggcaagagcaccatcgtcaaacagatgaagatcatccacagcggcggcttca

SEQ ID NO: 3082 - DNA, 26 bp, Homo sapiens
cgcggctcggcaccaacctgatgacc

SEQ ID NO: 3083 - DNA, 161 bp, Homo sapiens
actaaagccgtagccaacagagcagtagtaatccgcgtcgtcttcaggctgcacgggactaatggtgaggacacaggcattgtgggcctcatccttggctgccgagaatcgatcggggatgtcagcaggccggtggtgatcctcctccgagcggtagtaga

SEQ ID NO: 3084 - DNA, 88 bp, Homo sapiens
agcgcccctaaggagctccgaggagctgtggccatgagctcagccatctttacggctctggggatcgtgatgggacaggtggtcggac

SEQ ID NO: 3085 - DNA, 76 bp, Homo sapiens
tttaatcagatccacgatgcgcagctcgaagggaatgtcgttcttcttggcaaagatgtaaacagcgcggcagggc

SEQ ID NO: 3086 - DNA, 147 bp, Homo sapiens
tccccgtggacgagattgaccggccgggcagctttgcctggcacatgaaccgctccatcgtgctgctgctcaaggtgctggcccagctgcgggaccacagcaccctgctgaaggtgtcctccatgcttcagcggaccccagaccagg

SEQ ID NO: 3087 - DNA, 143 bp, Homo sapiens
gagagaacttctttcctgtgacagtggtgcccacagcccctgaccctgtgccagctgactctgtccagcggcccagtgatgctcacaccaagcctcgccctgcactagctgccgccacaactattatcacctgccctccgtca

SEQ ID NO: 3088 - DNA, 103 bp, Homo sapiens
cgagggagccgtgctccactgacgccaatcccagggagtaggaacaagccaggtcagcgtgttcttcttcctctcactctccaagcgagactgcgcctgcggg

SEQ ID NO: 3089 - DNA, 39 bp, Homo sapiens
tggcggaacagcacggagcacccgaacaggctgcagctg

SEQ ID NO: 3090 - DNA, 43 bp, Homo sapiens
agcgtggcctgacagcgtacggccggcacaagagaggctcgac

SEQ ID NO: 3091 - DNA, 64 bp, Homo sapiens
tgcagtcctggttgagctgtactctgtccctggccacagatactatgaggactccttctcgaca

SEQ ID NO: 3092 - DNA, 126 bp, Homo sapiens
tttacccgagatccagaatggctggaaaaccacttctcacacggagttggtgcggggagccagaatcacctaccagtgtgaccccggctatgacatcgtggggagtgacaccctcacctgccagtg

SEQ ID NO: 3093 - DNA, 210 bp, Homo sapiens
actctgggctagtggacgatcaggttctagaaaaaatgccaacttggaagcttgtggcaccaattcaagctgggatggaacagcaggagatatgaaatacctcaggctcagtatggcagagagggagccaagcccgtcccggccccaacactaccgattaaatacagttctttatcaagtgctctgggtctgccgacctgaagaactaac

SEQ ID NO: 3094 - DNA, 24 bp, Homo sapiens
aggactctgctggtgtcagcctgg

SEQ ID NO: 3095 - DNA, 59 bp, Homo sapiens
tgctcatagggctcaaactcaggagtgctagaagtcaggcctcgggcttgtctctctct

SEQ ID NO: 3096 - DNA, 88 bp, Homo sapiens
gccgggcaccgacagagcggtccctccccccgccccccggagtccccgcgccccgcagcccgagcctccaccgagcacgatccgctcg

SEQ ID NO: 3097 - DNA, 120 bp, Homo sapiens
caagtcgtagacggcgccgtcgagcagcaccgcgggtcggtagaggcgcggcccgtccgtgggccggtggcgctcggggtagtcaccgaacaggaactggcggatgatggccgtcttgcc

SEQ ID NO: 3098 - DNA, 150 bp, Homo sapiens
catgcggaggaaggtgagaaaaacacttcgatggaggcgcttctgcatgtcaacaacctcaggggctgaggccaccccctcgtcgaatttgcgggggacatagcgcaggtaggagtccaggcacttctgtagagtctcgtcaaagatcac

SEQ ID NO: 3099 - DNA, 26 bp, Homo sapiens
agcctgagttccagtgagccatgact

SEQ ID NO: 3100 - DNA, 113 bp, Homo sapiens
aaattcccagaagtcgcctgcgaccgcctccctgcttcaaacaccagagagggcccggggtcctggccggagacaggccgaacctccggagctgcttctgcacccggtacatt

SEQ ID NO: 3101 - DNA, 169 bp, Homo sapiens
gtgctcctcactgtttgactgaccttgatgggatcctgaacgtctcagaggctgctcccctgtgacatggaccctggcgacctgtacaccagcgtcaccagggttgttctgcaggtcaaaagagacaatgtgggtgaagcagtcccctggcgtcaggtaccttttgtcg

SEQ ID NO: 3102 - DNA, 44 bp, Homo sapiens
gctccgcccagtcagccgagagcagcagcgttgccatgactccc

SEQ ID NO: 3103 - DNA, 367 bp, Homo sapiens
caatggaatgtacccaggagcccctaatcccccattgatttagtgttcgggcttggtcagcagtcttcttgtcccactgcaggcatgtgcagccccggctctttctgagttaagccagggactgaaatgggtcggcagaatgctcatctgttgggcgctttatggtttataaagccctttcccttctgtgccctcctcacaaccccatggagactctgcacggcccctccagctcttagaggctgcattttgcgcagtgaaggccacattaaatattaacagggcagctcctggccccgctgtgacgtcaattacggggccgcttggtgagggctgcggatgcctttccaaggtgaagcggtgaccg

SEQ ID NO: 3104 - DNA, 30 bp, Homo sapiens
tgcaagctccactttccaggttcacaccat

SEQ ID NO: 3105 - DNA, 90 bp, Homo sapiens
gaggtaccgctcggactgcaccatatactgtccgccctctgcccctcaaatgggctcctctgaaagcggctgccgtggtggctgcagtag

SEQ ID NO: 3106 - DNA, 36 bp, Homo sapiens
gaaggtgccatcagggaggctgtagacacggatgac

SEQ ID NO: 3107 - DNA, 97 bp, Homo sapiens
gacggaggaagtcagagatctgaagcacaagaaggatctgatgtgctgttgctatcttggagatggagggggccatgtgacaaggaatgcaggtggc

SEQ ID NO: 3108 - DNA, 26 bp, Homo sapiens
ttgctttctgccaccattgcaagttt

SEQ ID NO: 3109 - DNA, 34 bp, Homo sapiens
cgatctcctgatgtcaagtgattctccgcctcgg

SEQ ID NO: 3110 - DNA, 35 bp, Homo sapiens
gtgcttctttgacggggccgccgtgctcagctgct

SEQ ID NO: 3111 - DNA, 126 bp, Homo sapiens
aggggctcggcagcctccacaccaggcaccactgccagattcccgtgcccgaccccgcgacccacggccaatacatcgtctctgttcagccaaggagggcagagaaacacataaagagctcagtga

SEQ ID NO: 3112 - DNA, 1049 bp, Homo sapiens
acgggaaggagatacctgcccctgccaccgggaccccgtcccaccagccttggggagcagtgggtaatggaggaccagcagcacctgaacacccagaacacaggcccccatgagctctgggtctgctttaaaacctatgtacacatctctccccgcctgggctggactggccagtcactgagggcaggggcagggcctgtgtctgaccccctcacccttcccgggacccagcacagagtgagtgctcagtgtttaatgaatgaataaatgaacggtggctgcagtggtgcaggcctgagcaagagaagagggggaaggggtaaagagaacatagcacggggagccctggagggatgagagaatttaagaatgttggaattggccaggcacggtggctcacacctgtaatcccagcattttgagaggccgaggcgggtgggtcacctgaagtcaggagttcaagaccagcctggccaatatggtgaaaccccatctctactaaaaatacaaaaattagccaggcatggtagcaggcgcctgtaatcccagccactagggaggctgaggcagaagaatcgcttgaacccgggaggcagaggttgcagtgaactgagattgcaccactgcactctagcctgggcaacagagcaagactctgtctcaagaaaaaaaaatgttgggagaattctagaatgtggggaggattccagaatgttcagaaagtactagaatattgagaaagtcctagaacctggttgctccagtgtggttcatagactgaccccatcagcatcacccaggaacatatgagaaacacagaatcctggacccactcagacctgctgagtcagaatctgcatttaacacgaaccccgggtgattcgcatgcatttccaagtttgagaagtgctgggctacgaggctgggaaagttctagaatatttaggttagcaagcttcttaaaataggtccaagagagaagagaggagcagaaataggctgggagggatgatggcagccaagatagaagcagggtctccccagaatgc

SEQ ID NO: 3113 - DNA, 78 bp, Homo sapiens
tcttcctcacgctgccggcggaggatggagccggcactgggggggaagggcaggatggagagccgattgatctccttt

SEQ ID NO: 3114 - DNA, 145 bp, Homo sapiens
gtgtatgaccagcacggcttccgcatcctcttccattttgcccgggacccactgccagggcgctccgacgtgctggtggtggtggtttccatgctgagcaccgccccccagcccatccgcaacatcgtgttccagtcagctgtcc

SEQ ID NO: 3115 - DNA, 98 bp, Homo sapiens
tcactgtgcccgttttacagacaaggccactgagctctgagaggttatgtgacttgcccaaggtcaccccgcctgcaggtctcaaaggtgggatttga

SEQ ID NO: 3116 - DNA, 139 bp, Homo sapiens
gagaatgcaccgtccgcctaggacagcggttctcaacggggtccattttgtcccccttggggacatttggctgtgtctgggaatacttctggttgtcacaactaggacaaactaactctctagaaaaaacgtgtgtgtg

SEQ ID NO: 3117 - DNA, 78 bp, Homo sapiens
cactgcctggcctacgccaactcctgcctcaacccgctcgtctacgcgctcgcctcgcgccacttccgcgcgcgcttc

SEQ ID NO: 3118 - DNA, 104 bp, Homo sapiens
gcagccttggacggcacagtggcagctggcgatgagatcaccggtgtcaatggcaggtcaatcaaagggaaaactaaggtggaggtggcgaagatgattcagga

SEQ ID NO: 3119 - DNA, 121 bp, Homo sapiens
gaagccacgggctcggcggcactgcggagccggttggcagtggcccccgtgggtgggccagggggcagggctcgggtcgcggacccccgtagctgccccatcctctcctcgcgttcgtgtt

SEQ ID NO: 3120 - DNA, 99 bp, Homo sapiens
agtgctgttgggtgacaaggccttgggcacatgctctaaggtaacggctgtggggcggatgcgggcagagaggcggaccacggcgaagccttgtggccc

SEQ ID NO: 3121 - DNA, 79 bp, Homo sapiens
tgagccggcatgccaccttcgagaacttcggcatggccttcctcacactcttccaggtctccacgggtgacaactggaa

SEQ ID NO: 3122 - DNA, 108 bp, Homo sapiens
ttaagccaaccaacggccgccagcccaattggcagctctccatcgccaccagtcaatggtggcaacaatgccaaaagggtggcagtgccgaacggacaaccgccaagc

SEQ ID NO: 3123 - DNA, 25 bp, Homo sapiens
actcgccctctcatcctgttgggcc

SEQ ID NO: 3124 - DNA, 34 bp, Homo sapiens
tttgcaccgacatacgcctcctggcaaacctcaa

SEQ ID NO: 3125 - DNA, 62 bp, Homo sapiens
cgggaggtcgagagagactttgcctccgtgtattcccgtctggtgctctgtaagaccttcag

SEQ ID NO: 3126 - DNA, 82 bp, Homo sapiens
tttcctggcgacgcggccctgcaggcggttgcgttccccgtcgttaccctctttctcttcccgacgcgtgagttaggccgta

SEQ ID NO: 3127 - DNA, 231 bp, Homo sapiens
cagactcgccctgccttggacatgtgtcaagagatggagcagctgctgcttcactcacaggaaaggttggtgtcactggagcctgtcatcagtgtgaggtctcgccccacctccatgaccttaaccacctctcttccaaacttactttcagctgagaggctgcagttctgcccccagagagctcctgcctgatccttcccaccaaacactgagaatgtgcacttggaagtc

SEQ ID NO: 3128 - DNA, 95 bp, Homo sapiens
aggagagcatgccttttgctgtggtgggaagtgacaaggagtaccaagtgaatggcaagagggtcctcggccgaaaaactccatgggggatcatc

SEQ ID NO: 3129 - DNA, 51 bp, Homo sapiens
tggcggtgaatcagagccacaccgagaaccgccgcggagccctcatcccta

SEQ ID NO: 3130 - DNA, 1747 bp, Homo sapiens
aaacaggcccggagttcattcaaatccagcctctgggagcaggggccttgccactcggttatgtgagcctgctaaagccctccttgccatgtgtgcttgcaggcgggggcccagaaccaagttgggaggccactggctgtcctgtgggaccagagaagtctggtgccaccctagcagggccaagggacttcttctggacgtcagtctgtgcccagcctctaccaccagctttcccttccctgcagggaggggcatgacctgcagaaccaaaggtgcttctgtgagccagtagcccagtgctgcttgggggcaggggcggggcctgtgccttgggttcccccccctccctgggcacatttggggttggggcagcccacacggtggggtgggaagattgacctgcccattttacaaatgagcaaaggtgggagaactcagggagacatgggggagcagagggaggaagcagagcccaacagcccggggcacccggaccccagccactgcctgcctgtggatgggtttctggccacggtgcagggctactgcgaggaggaaatgagggtgatgtgggcacctgaaacagcagaaatggctcagggccaggcactggggagccactgtccccatggggcttgagcttctgcctcagagggaccttccggctgccattgagggtcccagcaccaaaccccacagctggaccacttgggacctcaatccacagggggccagggctgcggcctatggcagataaagatagaggaggagggctggatgaagccacaggtggtgggcacaggataggccagacagaagggactttgggggactccaccttgggtagaaggagggacagctgaggtcctgtggtggagaaggcctggagcagagggtgaccaaggagatgacagagtgcacgtacagggccaggccaatgggagtgggaacccttgggagagggagcttcaggccattcattcagttcctgtttagccagcaccctcctcccctcatctgtccctctgccctcaccccaacatgccagaatctccttcctctccagcttgtacccaagccctctctgctccatgcccccagcctgctgaccacctctcagccatgtcctgggcctccagatctgtccctgatcctagtcttgcctctgaggggtccatcatccttgtctgtcccccagacctcccacgccagcccctgctcccaccctgcctggctgcctcgtgcctctggcccagctgggtaggtagggatttgcatagctgctccccagctcctccatacctcggctccccacacagcactgctaggcgcccctgcagggtcctccctcagctcagaggctgccctactggctgaggtgcaggctggtgccaagagagcatgctgctctgtcagcatgaggcagtgagcagggctctgggcaagggtggcatccaggaaagcccttgaagactgaggggcgctttgctggttgggccaagggaggaagggcctgcctggcagaaggaacagcctgggcaaaggccccaagatgggaaagccttggtggttggggcatagaatgggggggcagtggggccggccaagacaggaagggccttgaatgtgagggtgaaatgatggggtgtccctgggggccttactcccaactcagatcaagtcctttggtggcaggggctgccccggtcctctgacccagggcaagctctatgagcggtggagccca

SEQ ID NO: 3131 - DNA, 66 bp, Homo sapiens
atgcccggcccgtgattggctcggaaccacctcaggtcctccactgcatcagctgctctgatgctc

SEQ ID NO: 3132 - DNA, 65 bp, Homo sapiens
cctggtggttctccgaggcgtacaggcgcccatcgcgcacgatgtcctctatgagttgctggtag

SEQ ID NO: 3133 - DNA, 39 bp, Homo sapiens
agcagcggctgcctggcggtctcctttgctcgtgcctgg

SEQ ID NO: 3134 - DNA, 65 bp, Homo sapiens
taaagattccgtgctcgggcaggcagggctggcgctggactagtcccgttggaagctggatgcac

SEQ ID NO: 3135 - DNA, 25 bp, Homo sapiens
ccttaagttctttataacgatccag

SEQ ID NO: 3136 - DNA, 24 bp, Homo sapiens
cagtgtcatgtgaggacgtgcttc

SEQ ID NO: 3137 - DNA, 1129 bp, Homo sapiens
ctggcaagttcgatgttagctcccgggacactcagcagcgatggtgagcattttggtttccttaaggcccagcaagacttccagggacatctctggtgaagccagaatggagacacccgtgacctcaggctgaaagtcactcgacattggtctcttgtgttgatagggaaggaaatcaggcattcctatttctttaaataacaaaaccactaattgccactcaatgctggaatattttgggtcacctaatcatagatttctcagggcatcaatactcaaatataggctgattatgccccagttcaaatgggaactattaacagagtgcatttcttgcttgctgggtttcaacagacatcagccaaaagaacaaaagagatgtcaggacagattccaggagtgtcggagcacatgtgtggcacccgctccctctggcagcgaatgtaggaagtcgccaaatttacccactcttcaacaagtcattgtttaaacacggtttttcattttctcaacttttaatagcaaaaagtgccaaagtcctcagagacctaacagccttggtctaccgtgctgaccagggtgaaggcacggcgagggactcctcccagacgtgcctcttgtgtgccagctggctgtggctcgggagcagacgcaggcctctccattgtccaggggagcctggcggcgcatccctcctctcccacctcctggcacttccagctgggtgtcccacatgttggattccgtccccaccacacttccagagaccggagaactgtgcagggcctaaggccgtttggatgaattgtcaaaacaagatgcttccagttacagcggcaggagcgggactgggagcacgggctgacggctgctggtgcctttcttcccacctcgcttgcctgtttccgcttgacccttcctccagctccgatgagaagagtataaagcatcttcctaacgggtgtgtttgctatacgaacataatggacgtgaagtggggcagaaacccagaactcagcattcaaggatgcccaggagagctgtccctgttttaaagagctgtgttttgttttgtttcgcatttagagagcagacaaggcacccttctgctgcgctgatacgtttctta

SEQ ID NO: 3138 - DNA, 60 bp, Homo sapiens
gcactggccgttggtcttattacagtcgggatcaaagcctttgctgacggcacagtggca

SEQ ID NO: 3139 - DNA, 38 bp, Homo sapiens
cgaggcggcggcatcagtggagatccacatgctgctct

SEQ ID NO: 3140 - DNA, 24 bp, Homo sapiens
gcggctgccacgtcaatgtgcaga

SEQ ID NO: 3141 - DNA, 57 bp, Homo sapiens
tttaatgttgcaatcaccagacccaaagctttgctgatagtgctgggaaacccccat

SEQ ID NO: 3142 - DNA, 115 bp, Homo sapiens
gtgcatcctagcccgcccgaggcccctgccaccccccatgggggtctgggcccggcctcgcctgccctcctgggccagtcacccctcccccagcccacccaaataaaggattatt

SEQ ID NO: 3143 - DNA, 95 bp, Homo sapiens
gcgctcggggcttcgctcgcggctgcccgactcttgcccctcggtcgctgttccccgtcgccggcgccccgctctacgttgtcgggcgccgccat

SEQ ID NO: 3144 - DNA, 25 bp, Homo sapiens
cggggcctgcttcacccgcgtgcag

SEQ ID NO: 3145 - DNA, 143 bp, Homo sapiens
actctggttctagaaactcgcctgcagccgctggctggaccagcacacgctgacggggccggactatttacaggcccattgcgggctgtaccttggccacctcccggcacggtgctcagctgtgacgccaaaataagttaggg

SEQ ID NO: 3146 - DNA, 42 bp, Homo sapiens
tgcagcaggcgcaagaccaggcttgtgaaccacgggctgtgc

SEQ ID NO: 3147 - DNA, 591 bp, Homo sapiens
ctacctgcgcacctgcatgtgttcaacccccgggagaacacctggcggcccctgacccaggtgcccgaggaggccccgcttcggggctgcggtctctgcaccatgcacaactacctgtttctggcggggggcatccgtggctccggtgccaaggccgtctgctccaacgaggtcttctgctacaaccctctgaccaacatctggagccaggttcggcccatgcagcaggcccgagcccagctcaagctggtggccctggacgggctgctctatgccatcggtggcgaatgcctgtacagcatggagtgctacgacccgcgaacagacgcctggaccccacgcgcgccactccccgcaggcaccttccctgtggcccacgaggctgtggcctgccgtggggacatctacgtcaccgggggtcacctcttctaccgcctgctcaggtacagccccgtgaaggatgcttgggacgagtgcccatacagtgccagccaccggcgttccagcgacatcgtggcactggggggcttcctgtaccgcttcgacctgctgcggggcgtgggcgccgccgtgatgcgctacaacacagtg

SEQ ID NO: 3148 - DNA, 116 bp, Homo sapiens
ttggagaccaagtaaaggcagaagaggtgcctgtcgatccctgccccggtcatggccaggcggtacatattctggtgcttcttagcagccttctggaagagatctcgcaggtctgc

SEQ ID NO: 3149 - DNA, 53 bp, Homo sapiens
tcagagagctggaggcgtggcaggcagggtctgcagtggtatcactgtgggca

SEQ ID NO: 3150 - DNA, 24 bp, Homo sapiens
tgacggccgcctcctgaagctcca

SEQ ID NO: 3151 - DNA, 127 bp, Homo sapiens
tttagaatgtcaaaattgattttgtaatagtcaggacaggataaacagtcgctatattaagaccatgtacgtgtccctagacctagttctttccctacgtctgtttttataaatgctggtgataaac

SEQ ID NO: 3152 - RNA, 23 nt, Homo sapiens
aacauucauugcugucggugggu

SEQ ID NO: 3153 - DNA, 63 bp, Homo sapiens
cctggatgatgataagcaaatgctgactgaacatgaaggtcttaattagctctaactgactaa

SEQ ID NO: 3154 - DNA, 134 bp, Homo sapiens
ttggcccttatcgaagctgcagctgcttccgcatagctgctgtggtcaaaaaggagcccagagtgacagttttccttgacggtcgccgttctgtttgttgtaactgatctgcaacattttgggaaaatacagtt

SEQ ID NO: 3155 - RNA, 22 nt, Homo sapiens
gcccaaaggugaauuuuuuggg

SEQ ID NO: 3156 - DNA, 129 bp, Homo sapiens
actggaggactaagaaggctgagtctgatgaagtaagactttgctgatacattcctcctagaaaaaagggttggagagagcagccttcactgaagagtatcacagggctgactgtactacccaacactc

SEQ ID NO: 3157 - DNA, 119 bp, Homo sapiens
atgcaggtactgttataactgaagtgttttacggttttttcttcctgcttaaagcacttggtacataagtatctctaactcgattccataataagacagagacgcttggtctcaaacat

SEQ ID NO: 3158 - RNA, 22 nt, Homo sapiens
ugugcgcagggagaccucuccc

SEQ ID NO: 3159 - DNA, 133 bp, Homo sapiens
ttatcagctgggataatctttacctgttccttcttttggagggcaaattaggacatgattggggttcacatagtatgcgattaacgtctctgagtaatcaggacttccagtaccctgattgtgcctatctgat

SEQ ID NO: 3160 - RNA, 22 nt, Homo sapiens
aaaucucugcaggcaaauguga

SEQ ID NO: 3161 - RNA, 21 nt, Homo sapiens
uucaaguaauucaggauaggu

SEQ ID NO: 3162 - DNA, 137 bp, Homo sapiens
taccaaaagttagctttttggggggcaggtttttaagtaacctttgccaacttgggctatttggaagagtaaaagaccacactccacagtgggctataccacttagtatagttcgctactattttgtggcctacatg

SEQ ID NO: 3163 - RNA, 21 nt, Homo sapiens
aguuaaugaauccuggaaagu

SEQ ID NO: 3164 - RNA, 22 nt, Homo sapiens
aaauuauuguacaucggaugag

SEQ ID NO: 3165 - RNA, 22 nt, Homo sapiens
aaaaguaauugcggauuuugcc

SEQ ID NO: 3166 - RNA, 20 nt, Homo sapiens
auguauaaauguauacacac

SEQ ID NO: 3167 - RNA, 23 nt, Homo sapiens
aguauguucuuccaggacagaac

SEQ ID NO: 3168 - DNA, 125 bp, Homo sapiens
gcgctcactaaggctcggtcctctccacgtggtcctgacctgtcctctgtgagcaagagaaacaggactggtttgggggtgtcctgtctcagtggacacaggacaccacggttttcagtacaaca

SEQ ID NO: 3169 - DNA, 69 bp, Homo sapiens
tagcatatgatggaaaaatcttaatcttctgagacttgtgatgtcttcaaaggaaccacttcaatgcaa

SEQ ID NO: 3170 - DNA, 125 bp, Homo sapiens
gtgacatgtatgtttttgtttaacttgtatacaaaggcttatggataggtgcaaaaataaattctcttttgcaacccagaactcattgttcagtgtgagttttgatacatataagaagggatatt

SEQ ID NO: 3171 - DNA, 126 bp, Homo sapiens
atacctaaacccaagaatcactttcttatagtgatgatttaaacagatgcaaacagcgagcacatcttgtcacctttgcgggactgtggctgtgcccctcgcagtaaatttggaggttctacatcc

SEQ ID NO: 3172 - DNA, 63 bp, Homo sapiens
gcggtgatgaccccaacatgccatctgagtgtcggtgctgaaatccagaggctgtttctgagc

SEQ ID NO: 3173 - RNA, 21 nt, Homo sapiens
ucuuguguucucuagaucagu

SEQ ID NO: 3174 - RNA, 22 nt, Homo sapiens
uagcaaaaacugcaguuacuuu

SEQ ID NO: 3175 - DNA, 204 bp, Homo sapiens
tttccagcagtagtcagccatccggacagaaccgttcctgtgatggtgttacactgctgggagaggaatgtcttgtcttcatccggttgcctgcgccactgttctggtggcgtctggcactggtgcaagacagagctgtgcttccccgagagtgtgctaagcattcactttggctgcttagttctagtctgggagcagacagag

SEQ ID NO: 3176 - DNA, 133 bp, Homo sapiens
aagccagccaatgaatctgcttacctgattgtgtttgtgcagacatactttaaaaactggcaatagtaaagccatgttacgagccttaaggacattgaagtcgttaaggtccctgagaatggctataacaaat

SEQ ID NO: 3177 - RNA, 21 nt, Homo sapiens
uccucuucucccuccucccag

SEQ ID NO: 3178 - RNA, 23 nt, Homo sapiens
ucaagagcaauaacgaaaaaugu

SEQ ID NO: 3179 - RNA, 20 nt, Homo sapiens
agaccauggguucucauugu

SEQ ID NO: 3180 - RNA, 23 nt, Homo sapiens
agugccugagggaguaagagccc

SEQ ID NO: 3181 - RNA, 23 nt, Homo sapiens
caaagugcuguucgugcagguag

SEQ ID NO: 3182 - DNA, 132 bp, Homo sapiens
tgggtttggattatgacaggcccatccccctggacctctcatagtgccccatgccagagcaaactgtggccccgaaccattgcctggcttctgtacccgtgggccactggcactgaagagggttacacagtg

SEQ ID NO: 3183 - DNA, 156 bp, Homo sapiens
tctcgtggtagttttctttttggcacatttgttaagttttcaaatgggcctaacactgccacatgtattatactggagttggcaaaggcctgtgacaatgagatatctctcaagcctttcacgcctttcctctatcagagaatggctcccacatgt

SEQ ID NO: 3184 - DNA, 76 bp, Homo sapiens
acaatgatgacttaaattactttttgccgtttacccagctgaggttgtctttgaagaaataattttaagactgaga

SEQ ID NO: 3185 - DNA, 131 bp, Homo sapiens
agcctcctggtgtttaacacagctgtgttcttatactgactgtgtagaaagagaaggaaataaaccttaccccatatgcatttcatccccggaccctgcacctcgtctatattgtgaatagggaaatatgg

SEQ ID NO: 3186 - RNA, 21 nt, Homo sapiens
ucgaggagcucacagucuagu

SEQ ID NO: 3187 - RNA, 22 nt, Homo sapiens
auccgcgcucugacucucugcc

SEQ ID NO: 3188 - RNA, 22 nt, Homo sapiens
cuuucagucagauguuugcugc

SEQ ID NO: 3189 - RNA, 22 nt, Homo sapiens
agagguaguagguugcauaguu

SEQ ID NO: 3190 - RNA, 21 nt, Homo sapiens
aggcaagaugcuggcauagcu

SEQ ID NO: 3191 - DNA, 147 bp, Homo sapiens
agttgtggtggttttctttttggcacatttgttaagttttcaaatgggcctaactctgccacatatataatatcggagatggcaaaggcttgtgacggagatatctctcttaagcctttcctgcatcagagaatggctcccacatgt

SEQ ID NO: 3192 - DNA, 128 bp, Homo sapiens
gtgcacatttcattgacctgctttcttttatgtgagtagtgttatttcttatgtgctatacaaataattgaaggctaattagcagtataactataaatagtaatgctgccagtctccttcagacaaaa

SEQ ID NO: 3193 - RNA, 21 nt, Homo sapiens
guucaaauccagaucuauaac

SEQ ID NO: 3194 - RNA, 22 nt, Homo sapiens
aaaaguauuugcggguuuuguc

SEQ ID NO: 3195 - DNA, 153 bp, Homo sapiens
attgcacgttgttggagcttggagttggtgctctaactggctgataaacttgcaagtgtaggtagtatgctatgtgaggggcaaatttttcagtaacatgacaaaggtctttggcctagtgagtagagtttgacaataatcctcgctgcaagt

SEQ ID NO: 3196 - DNA, 149 bp, Homo sapiens
cctccttttcttggcggggatcgggcttgtggtgccgctccccgtaatgtacggaggaagagggaaagggctctggccccctcggcgtcatgtcttcggtgctggcggcttcccatccgctggttctatcctcaaacgccgggacaccg

SEQ ID NO: 3197 - DNA, 63 bp, Homo sapiens
acagatgatgaactcattgacagacatacagagactgtgtgctgattgtcatgttctgactta

SEQ ID NO: 3198 - DNA, 137 bp, Homo sapiens
ggcctcctgggatcccatctggaaagtgcttagtattctgcctgcttcacaaagggagggaaagcaaacgtggtgaggcaccctttccattccagcttgctcggtagctggtgattggaagacactctgtgacagcg

SEQ ID NO: 3199 - DNA, 123 bp, Homo sapiens
gagcactgttcgtaacccgttagcctggctgtagctaatgggttccattccggtgcaatagcatttccagcgacacatgactgactgactggtggctttcagtttcaggtcttggagacaaat

SEQ ID NO: 3200 - DNA, 73 bp, Homo sapiens
gttcagatgatgaatttaactgttcaactgctgaatgataacgggcatgaactaaaacttaattctgacagag

SEQ ID NO: 3201 - RNA, 22 nt, Homo sapiens
aagcccuuaccccaaaaagcau

SEQ ID NO: 3202 - DNA, 205 bp, Homo sapiens
aagactatactttcagggatcatttctatagttcattactaaagaagtctatctgaacatgtagaacacatgacaccataaggaggaggcacaacattctccctagagcctgaagctggctcttggtgtttcatgactacagcagccatttgccactgatgactgttctcttccaggagaataagaaggagaagatgcagtttgg

SEQ ID NO: 3203 - DNA, 75 bp, Homo sapiens
gtcagatgatttgaattgataagctgatgttctgtgaggtacaaaagttaatagcatgttagagttctgatggca

SEQ ID NO: 3204 - RNA, 22 nt, Homo sapiens
cuagguauggucccagggaucc

SEQ ID NO: 3205 - RNA, 22 nt, Homo sapiens
aaguucuguuauacacucaggc

SEQ ID NO: 3206 - RNA, 22 nt, Homo sapiens
ucagugcaucacagaacuuugu

SEQ ID NO: 3207 - DNA, 131 bp, Homo sapiens
tggcaagcctccagcgtgcgtgggtctgtggtgatgtgtgcattcctacactgcttgccagaacagtattgaaatagtggagcgtttgtcctgctccatccagagcaaggttatagaaatttcagacaatt

SEQ ID NO: 3208 - DNA, 126 bp, Homo sapiens
tacccccttttcactttgccagttggacttatgtctttattggtcattcaagtggggcaaaggaaatatccttttaaaactcaggcaaactgggtgtttgtctgtatcctgtcagaggaaacaaat

SEQ ID NO: 3209 - RNA, 22 nt, Homo sapiens
uaugucugcugaccaucaccuu

SEQ ID NO: 3210 - RNA, 22 nt, Homo sapiens
uggugggcacagaaucuggacu

SEQ ID NO: 3211 - DNA, 275 bp, Homo sapiens
aatctgtagtcttggagccgcacagggttggtggtaccctcgagcacaccagacttgcagaaaaagcatactccagaggaagctgaggcatgcctgctcgagagccagctgttccatgtgcaattttcctctgatagtttctggtcactgttgccacggtgataatgactgggctatgtcattatctatccgccaacagtaagagaagctttgcagtcgagatattgtttagcagatggagtgttttctgttgaacactaagtactgccacaagt

SEQ ID NO: 3212 - RNA, 22 nt, Homo sapiens
aaacauucgcggugcacuucuu

SEQ ID NO: 3213 - RNA, 23 nt, Homo sapiens
ucuuggaguaggucauugggugg

SEQ ID NO: 3214 - RNA, 21 nt, Homo sapiens
aucauagaggaaaauccacgu

SEQ ID NO: 3215 - RNA, 22 nt, Homo sapiens
uuguacaugguaggcuuucauu

SEQ ID NO: 3216 - DNA, 74 bp, Homo sapiens
tgagccagtgatgaaaactggtggcatagaagtcaaggatgctgaataatgtgtgtctagaactctgaggttca

SEQ ID NO: 3217 - DNA, 126 bp, Homo sapiens
atgcaggtactgttacaatatgactgaagtgatttgttgtcatttcccctgcttaaagcccttgatatataactatctctgtctaactcattctgaagtaagacagagatgcttggtttcattttt

SEQ ID NO: 3218 - DNA, 82 bp, Homo sapiens
ggatcgatgatgagaaccttatattgtcctgaagagaggtgatgacttaaaaatcatgctcaataggattacgctgaggccc

SEQ ID NO: 3219 - DNA, 97 bp, Homo sapiens
tggatcgatgatgagtcccccataaaaacattccttggaaaagctgaacaaaatgagtgagaactcataccgtcgttctcatcggaactgaggtcca

SEQ ID NO: 3220 - DNA, 82 bp, Homo sapiens
gggtcagtgatgagaaccttctattgtcctgaagagaggtgatgacttaaaaatcatgctcaataggattacgctgaggccc

SEQ ID NO: 3221 - DNA, 98 bp, Homo sapiens
tggatcgatgatgagtccccccaaaaaaacattccttggaaaagctgaacaaaatgagtgaaaactcataccgtcgttctcagcggaactgaggtcca

SEQ ID NO: 3222 - DNA, 67 bp, Homo sapiens
ggatcgatgatgagaataattgtctgaggatgctgagggactcattccagatgtcaatctgaggtcc

SEQ ID NO: 3223 - DNA, 135 bp, Homo sapiens
tgcccctgacctgggaagagaggggcctggctggtggtatccatctcataccagctagggatgaagaaaccgcttgctcatcccagcctggctcctggtctatgcccatgcctggttcgtgccttggacatatca

SEQ ID NO: 3224 - DNA, 86 bp, Homo sapiens
aagacaacgtaaatatatgtataaagagtatcttcaggagacgtaataatgtaaaaatcatgctcaatagaattaagctgaggctc

SEQ ID NO: 3225 - DNA, 81 bp, Homo sapiens
gggtcgatgatgagaaccttatattttctgaagagaggtgatgacttaaaaatcatgctcaataggattacgctgaggccc

SEQ ID NO: 3226 - RNA, 22 nt, Homo sapiens
aguucuucaguggcaagcuuua

SEQ ID NO: 3227 - DNA, 48 bp, Homo sapiens
ctgatgatacttgtaataggaagtgccgtcagaagcgataactgacga

SEQ ID NO: 3228 - RNA, 21 nt, Homo sapiens
agagaagaagaucagccugca

SEQ ID NO: 3229 - DNA, 214 bp, Homo sapiens
aagactatactttcagggatcatttctatagttcattactagagaagtttctctgaatgggtagagcactggaaaccatgaggaggaggcacagtgttctctcctgagcatgaagctgactcttggtgttgcttcactgcacctgccatgtgccactgatgattgttcttgtcttcctctgggagagtaagacggagagcatgcagtctgagtg

SEQ ID NO: 3230 - DNA, 214 bp, Homo sapiens; identical to SEQ ID NO: 3229

SEQ ID NO: 3231 - RNA, 22 nt, Homo sapiens
caagcucgugucuguggguccg

SEQ ID NO: 3232 - RNA, 22 nt, Homo sapiens
cucuagagggaagcacuuucug

SEQ ID NO: 3233 - RNA, 22 nt, Homo sapiens
cucuagagggaagcgcuuucug

SEQ ID NO: 3234 - RNA, 18 nt, Homo sapiens
ugcuuccuuucagagggu

SEQ ID NO: 3235 - DNA, 85 bp, Homo sapiens
cccctatctctcatgatgaacacatatgcctctgagctgctgtgatttctggcttcaaagtaaacgctctgaagaagagatgggg

SEQ ID NO: 3236 - RNA, 22 nt, Homo sapiens
aacaucacagcaagucugugcu

SEQ ID NO: 3237 - DNA, 138 bp, Homo sapiens
tccctgtattcgaaagtgatcgtgggctgcctttgccctggtcattgatagtgcagggagaggaatcaatgaaagcgcttccccgtgtttgaagggtccactcctatcccttccaaactctggagctttcgtacatgc

SEQ ID NO: 3238 - DNA, 136 bp, Homo sapiens
gcccgccttggcctcccaaagtgctgggattcttacatcgactgcatagaaagaggagagaacataacctacctaccccgtacatacttcagcccaggtcctgtgcctcatctgtaatatgaatgaagagacatgg

SEQ ID NO: 3239 - RNA, 21 nt, Homo sapiens
ugcaggaccaagaugagcccu

SEQ ID NO: 3240 - RNA, 22 nt, Homo sapiens
aggggcuggcuuuccucugguc

SEQ ID NO: 3241 - DNA, 68 bp, Homo sapiens
ccgcagtgacagcaatatttttcatccacagttcacctcatgaatgttgtcactttgggtctgagtga

SEQ ID NO: 3242 - RNA, 21 nt, Homo sapiens
caaagguauuugugguuuuug

SEQ ID NO: 3243 - DNA, 133 bp, Homo sapiens
tagcaagcctccagcatgcttaggtctgcagtgaccctatgcatccctacagtgcttgccagaacagttttgaaacggtttgaggccttgccctgctccatccagagcaagggtatagaaatttcagacaatt

SEQ ID NO: 3244 - DNA, 139 bp, Homo sapiens
tacctcccaggatggcatctggaagtggatagtattctgccagctttggaaactggatgaaaagcaaatctggcagaggtacccatttcattcccagcttgctcagtagctggtgattggaagaaactctgcaacagtg

SEQ ID NO: 3245 - RNA, 22 nt, Homo sapiens
ugagguaguaaguuguauuguu

SEQ ID NO: 3246 - RNA, 22 nt, Homo sapiens
uuuugcaauauguuccugaaua

SEQ ID NO: 3247 - RNA, 22 nt, Homo sapiens
cgucaacacuugcugguuuccu

SEQ ID NO: 3248 - RNA, 22 nt, Homo sapiens
uacguagauauauauguauuuu
